(19) United States
(12) Patent Application Publication
(10) Pub. No.: US 2025/0257356 A1
(43) Pub. Date: Aug. 14, 2025

(54) COMPOSITION AND METHOD FOR INHIBITING EXPRESSION OF PROTEIN LPA(APO(A))

(71) Applicant: SHANGHAI ARGO BIOPHARMACEUTICAL CO., LTD., Shanghai (CN)

(72) Inventors: Dongxu SHU, Zhejiang (CN); Pengcheng Patrick SHAO, Warrington Township, PA (US); Shiwei XIA, Zhejiang (CN)

(73) Assignee: SHANGHAI ARGO BIOPHARMACEUTICAL CO., LTD., Shanghai (CN)

(21) Appl. No.: 19/196,722

(22) Filed: May 1, 2025

Related U.S. Application Data
(63) Continuation of application No. 18/730,467, filed on Jan. 1, 0001.

(30) Foreign Application Priority Data
Jan. 24, 2022 (WO) PCT/CN2022/073415

(51) Int. Cl. C12N 15/113; A61K 9/00; A61K 45/06; A61P 3/06

(52) U.S. Cl. CPC C12N 15/113; A61K 9/0019; A61K 45/06; A61P 3/06; C12N 2310/11; C12N 2310/14; C12N 2310/315; C12N 2310/321; C12N 2310/322; C12N 2310/346; C12N 2310/351; C12N 2320/32

(57) ABSTRACT

Provided in the present application are a composition and method useful for reducing the gene expression of LPA(Apo(a)) and for treating LPA-related diseases and conditions. Further provided are an LPA dsRNA agent, an LPA antisense polynucleotide agent, a composition comprising the LPA dsRNA agent and a composition comprising the LPA antisense polynucleotide agent, which are useful for reducing the expression of LPA in a cell and a subject.

### CROSS-REFERENCE TO RELATED APPLICATIONS

[0001] This application is a U.S. National Phase Application under 35 U.S.C. § 371 of International Application No. PCT/CN2023/073456, filed on Jan. 23, 2023, which claims priority to and the benefit of International Application No. PCT/CN2022/073415, filed on Jan. 24, 2022, the contents of each of which are hereby incorporated by reference in their entirety for all purposes.

### SEQUENCE LISTING

[0002] The instant application contains a Sequence Listing which has been submitted electronically in XML format and is hereby incorporated by reference in its entirety. Said XML copy, created on Aug. 28, 2024, is named PAT059637-US-PCT02_SL.xml and is 6,305,061 bytes in size.

### TECHNICAL FIELD

[0003] Some embodiments of the present invention relate to compositions and methods that can be used to inhibit LPA (Apo(a)) protein expression.

### BACKGROUND ART

[0004] Lp(a) particles are heterogeneous low density lipoprotein particles expressed predominantly in the liver (Witztum and Ginsberg, J Lipid Res. March 2016; 57 (3): 336-9). They consist of Apolipoprotein (a) (Apo(a) or Lp(a) is encoded by the LPA gene) linked to LDL-like particles via the ApoB polypeptide. Genetically defined high Lp (a) particle serum levels are not affected by diet and exercise and are associated with an increased risk of developing cardiovascular disease through associated atherosclerotic potential (Alonso et al., Journal of the American College of Cardiology Vol. 63, No. 19, 2014). levels of Lp(a) particles in serum in patients are a highly prevalent independent genetic risk factor for coronary heart disease and aortic stenosis according to diagnostic and preventive medicine (Saeedi and Frohlich Clinical Diabetes and Endocrinology (2016) 2: 7). Analysis of Lp(a) levels in multiple studies suggests that a high Lp(a) level is an independent risk factor for cardiovascular disease, stroke, and other related conditions, including atherosclerotic stenosis. In addition, genome-wide association analyses have also identified LPA as a genetic risk factor for diseases such as atherosclerotic stenosis. A significant reduction in cardiovascular events is observed when both Lp(a) and LDL levels in hyperlipidemic patients are reduced using a therapeutic lipoprotein hematocatharsis. Therefore, therapeutic agents and treatments associated with these and other LPA-related diseases are needed.

[0005] However, other than indirect standard general LDL reduction measures, there are no currently approved specific Lp(a) particle reduction therapies. Therefore, there is currently a need for methods for effective treatment of, prevention of and reduction of the risk of suffering from the following and conditions related to the following: Berger's disease, peripheral arterial disease, coronary artery disease, metabolic syndrome, acute coronary syndrome, aortic stenosis, aortic regurgitation, aortic dissection, retinal artery occlusion, cerebrovascular diseases, mesenteric ischemia, superior mesenteric artery occlusion, renal artery stenosis, stable/unstable angina, acute coronary syndrome, heterozygous or homozygous familial hypercholesterolemia, hyperapolipoprotein beta lipoproteinemia, cerebrovascular atherosclerosis, cerebrovascular diseases and venous thrombosis, stroke, atherosclerosis, thrombosis, coronary heart diseases or aortic stenosis and/or any other diseases or pathologies related to elevated levels of Lp(a)-containing particles and other related conditions, pathologies or syndromes that have not yet been identified. The present invention addresses this unmet medical need.

### SUMMARY OF THE INVENTION

[0006] According to an aspect of the present invention, a double-stranded ribonucleic acid (dsRNA) agent that inhibits LPA (Apo(a)) expression is provided, the dsRNA agent comprises a sense strand and an antisense strand, and optionally comprises a targeting ligand. A region complementary to the LPA RNA transcript is included at nucleotide positions 2 to 18 in the antisense strand, wherein the complementary region comprises at least 15 continuous nucleotides that differ by 0, 1, 2 or 3 nucleotides from one of the antisense sequences listed in Tables 1-3. In some embodiments, the region complementing the LPA RNA transcript comprises at least 15, 16, 17, 18 or 19 continuous nucleotides that differ by no more than 3 nucleotides from one of the antisense sequences listed in Tables 1-3. In certain embodiments, the antisense strand of the dsRNA is at least substantially complementary to any target region of the mRNA of the human LPA gene and is provided in one of Tables 1-3. In some embodiments the antisense strand of the dsRNA is completely complementary to any target region of the mRNA of the human LPA gene and is provided in one of Tables 1-3. In some embodiments, the dsRNA agent comprises any of the sense strand sequences listed in Tables 1-3, wherein the sense strand sequences are at least substantially complementary to the antisense strand sequences in the dsRNA agent. In certain embodiments, the dsRNA agent comprises any of the sense strand sequences listed in Tables 1-3, wherein the sense strand sequences are completely complementary to the antisense strand sequences in the dsRNA agent. In some embodiments, the dsRNA agent comprises any of the antisense strand sequences listed in Tables 1-3. In some embodiments, the dsRNA agent comprises any of the sequences listed as duplex sequences in Tables 1-3. In some embodiments, the dsRNA agent comprises a sense strand that differs from formula (A) by 0, 1, 2 or 3 nucleotides: 5′-Z₁GUUAUCGAGGCACAUAZ₂-3′ (SEQ ID NO: 896) Formula (A), wherein Z₁ is a nucleotide sequence comprising 0-15 nucleotide motifs, and Z₂ is selected from one of A, U, C, and G or absent. In certain embodiments, Z₂ is A. In some embodiments, Z₁ nucleotide sequence is selected from one of the following motifs: A, AA, UA, GA, CA, AGA, UGA, GGA, CGA, UAGA, CAGA, AAGA, ACAGA, GACAGA, GGACAGA, UGGACAGA, AUGGACAGA, AAUGGACAGA (SEQ ID NO: 897), UAAUGGACAGA (SEQ ID NO: 898), GUAAUGGACAGA (SEQ ID NO: 899), GGUAAUGGACAGA (SEQ ID NO: 900), UGGUAAUGGACAGA (SEQ ID NO: 901), AND AUGGUAAUGGACAGA (SEQ ID NO: 902) or absent. In some embodiments, Z₁ is a nucleotide sequence comprising 1, 2, 3 or 4 nucleotide motifs selected from the following motifs: A, AA, UA, GA, CA, AGA, UGA, GGA, CGA, UAGA, CAGA, AAGA, AND ACAGA. In some embodiments, the dsRNA agent comprises an antisense strand that differs from formula (B) by 0, 1, 2, or 3 nucleotides: 5′-Z₃UAUGUGCCUCGAUAACZ₄-3′ (SEQ ID NO: 903) Formula (B), where Z₃ is selected from one of A, U, C, and G or absent, Z₄ is a nucleotide sequence comprising 0-15 nucleotide motifs. In certain embodiments, Z₃ is U. In some embodiments, Z₄ nucleotide sequence is selected from the following motifs: U, UU, UA, UC, UG, UCU, UCA, UCC, UCG, UCUC, UCUA, UCUG, UCUU, UCUGU, UCUGUC, UCUCUU, UCUCGA, UCUGUCC, UCUGUCCA, UCUGUCCAU, UCUGUCCAU, UCUGUCCAUU (SEQ ID NO: 904), UCUGUCCAUUA (SEQ ID NO: 905), UCUGUCCAUUAC (SEQ ID NO: 906), UCUGUCCAUUACC (SEQ ID NO: 907), UCUGUCCAUUACCA (SEQ ID NO: 908) AND UCUGUCCAUUACCAU (SEQ ID NO: 909) or absent. In some embodiments, Z₄ is a nucleotide sequence comprising 1, 2, 3 or 4 nucleotide motifs selected from the following motifs: U, UU, UA, UC, UG, UCU, UCA, UCC, UCG, UCUC, UCUA, UCUG AND UCUU. In some embodiments, the dsRNA agent comprises a sense strand and an antisense strand comprising a nucleotide sequence described herein that differs from Formula (A) and Formula (B) by 0, 1, 2 or 3 nucleotide, respectively, and optionally comprises a targeting ligand. In certain embodiments, the length of each of the sense strand (A) and the antisense strand (B) of the dsRNA agent does not exceed 35 nucleotides. In certain embodiments, Z₁ and Z₄ nucleotide motifs are completely or partially complementary. In certain embodiments, Z₂ and Z₃ nucleotide motifs are completely or partially complementary. In certain embodiments, the sense strand is complementary or substantially complementary to the antisense strand, and the length of the complementary region is between 16 and 23 nucleotides. In some embodiments, the complementary region is 19-21 nucleotides in length. In some embodiments, wherein the length of the sense strand does not exceed 35 nucleotides, including a region complementary to the antisense strand that includes at least 15, 16, 17, 18, or 19 nucleotides. In some embodiments, the dsRNA agent comprises a sense strand that differs from formula (C) by 0, 1, 2 or 3 nucleotides: 5′-Z₅CCAAGCUUGGUCAUCUZ₆-3′ (SEQ ID NO: 910) Formula (C), wherein Z₅ is a nucleotide sequence comprising 0-15 nucleotide motifs, and Z₆ is selected from one of A, U, C, and G or absent. In certain embodiments, Z₆ is A. In some embodiments, Z₅ nucleotide sequence is selected from one of the following motifs: G, AG, UG, GG, CG, AUG, UUG, GUG, CUG, UUUG, CUUG, AUUG, ACUUG, AACUUG, GAACUUG, AGAACUUG, AAGAACUUG, GAAGAACUUG (SEQ ID NO: 911), GGAAGAACUUG (SEQ ID NO: 912), AGGAAGAACUUG (SEQ ID NO: 913), CAGGAAGAACUUG (SEQ ID NO: 914), ACAGGAAGAACUUG (SEQ ID NO: 915) AND CACAGGAAGAACUUG (SEQ ID NO: 916) or absent. In some embodiments, Z₅ is a nucleotide sequence comprising 1, 2, 3 or 4 nucleotide motifs selected from the following motifs: G, AG, UG, GG, CG, AUG, UUG, GUG, CUG, UUUG, CUUG AND AUUG. In some embodiments, the dsRNA agent comprises an antisense strand that differs from formula (D) by 0, 1, 2, or 3 nucleotides: 5′-Z₇AGAUGACCAAGCUUGGZ₈-3′ (SEQ ID NO: 917) Formula (D), where Z₇ is selected from one of A, U, C, and G or absent, Z₈ is a nucleotide sequence comprising 0-15 nucleotide motifs. In certain embodiments, Z₇ is U. In some embodiments, Z₈ nucleotide sequence is selected from the following motifs: C, CU, CA, CC, CG, CAU, CAA, CAC, CAG, CAAC, CAAA, CAAG, CAAU, CAAGU, CAAGUU, CAACUU, CAACGA, CAAGUUC, CAAGUUCU, CAAGUUCUU, CAAGUUCUUC (SEQ ID NO: 918), CAAGUUCUUCC (SEQ ID NO: 919), CAAGUUCUUCCU (SEQ ID NO: 920), CAAGUUCUUCCUG (SEQ ID NO: 921), CAAGUUCUUCCUGU (SEQ ID NO: 922) AND CAAGUUCUUCCUGUG (SEQ ID NO: 923) or absent. In some embodiments, Z₈ is a nucleotide sequence comprising 1, 2, 3 or 4 nucleotide motifs selected from the following motifs: C, CU, CA, CC, CG, CAU, CAA, CAC, CAG, CAAC, CAAA, CAAG AND CAAU. In some embodiments, the dsRNA agent comprises a sense strand and an antisense strand comprising a nucleotide sequence described herein that differs from Formula (C) and Formula (D) by 0, 1, 2 or 3 nucleotide, respectively, and optionally comprises a targeting ligand. In certain embodiments, the length of each of the sense strand (C) and the antisense strand (D) of the dsRNA agent does not exceed 35 nucleotides. In certain embodiments, Z₅ and Z₈ nucleotide motifs are completely or partially complementary. In certain embodiments, Z₆ and Z₇ nucleotide motifs are completely or partially complementary. In certain embodiments, the sense strand is complementary or substantially complementary to the antisense strand, and the length of the complementary region is between 16 and 23 nucleotides. In some embodiments, the complementary region is 19-21 nucleotides in length. In some embodiments, wherein the length of the sense strand does not exceed 35 nucleotides, including a region complementary to the antisense strand that includes at least 15, 16, 17, 18, or 19 nucleotides. In some embodiments, the dsRNA agent comprises a sense strand that differs from formula (E) by 0, 1, 2 or 3 nucleotides: 5′-Z₉GACAGAGUUAUCGAGGZ₁₀-3′ (SEQ ID NO: 924) Formula (E), where Z₉ is a nucleotide sequence comprising 0-15 nucleotide motifs, and Z₁₀ is selected from one of A, U, C, and G or absent. In certain embodiments, Z₁₀ is A. In some embodiments, Z₉ nucleotide sequence is selected from one of the following motifs: G, AG, UG, GG, CG, AUG, UUG, GUG, CUG, CAUG, UAUG, GAUG, AAUG, UGAUG, GUGAUG, GGUGAUG, UGGUGAUG, AUGGUGAUG, CAUGGUGAUG (SEQ ID NO: 925), CCAUGGUGAUG (SEQ ID NO: 926), ACCAUGGUGAUG (SEQ ID NO: 927), UACCAUGGUGAUG (SEQ ID NO: 928), CUACCAUGGUGAUG (SEQ ID NO: 929) AND GCUACCAUGGUGAUG (SEQ ID NO: 930) or absent. In some embodiments, Z₉ is a nucleotide sequence comprising 1, 2, 3 or 4 nucleotide motifs selected from the following motifs: G, AG, UG, GG, CG, AUG, UUG, GUG, CUG, CAUG, UAUG, GAUG AND AAUG. In some embodiments, the dsRNA agent comprises an antisense strand that differs from formula (F) by 0, 1, 2, or 3 nucleotides: 5′-Z_{1I}CCUCGAUAACUCUGUCZ₁₂-3′ (SEQ ID NO: 931) Formula (F), where Z₁₁ is selected from one of A, U, C, and G or absent, Z₁₂ is a nucleotide sequence comprising 0-15 nucleotide motifs. In certain embodiments, Z₁₁ is U. In some embodiments, Z₁₂ nucleotide sequence is selected from the following motifs: C, CU, CA, CC, CG, CAU, CAA, CAC, CAG, CAUA, CAUG, CAUC, CAUU, CAUCA, CAUCAC, CAUGUU, CAUGGA, CAUCACC, CAUCACCA, CAUCACCAU, CAUCACCAUG (SEQ ID NO: 932), CAUCACCAUGG (SEQ ID NO: 933), CAUCACCAUGGU (SEQ ID NO: 934), CAUCACCAUGGUA (SEQ ID NO: 935), CAUCACCAUGGUAG (SEQ ID NO: 936) AND CAUCACCAUGGUAGC (SEQ ID NO: 937) or absent. In some embodiments, Z₁₂ is a nucleotide sequence comprising 1, 2, 3 or 4 nucleotide motifs selected from the following motifs: C, CU, CA, CC, CG, CAU, CAA, CAC, CAG, CAUA, CAUG, CAUC AND CAUU. In some embodiments, the dsRNA agent comprises a sense strand and an antisense strand comprising a nucleotide sequence described herein that differs from Formula (E) and Formula (F) by 0, 1, 2 or 3 nucleotide, respectively, and optionally comprises a targeting ligand. In certain embodiments, the length of each of the sense strand (F) and the antisense strand (F) of the dsRNA agent does not exceed 35 nucleotides. In certain embodiments, Z₉ and Z₁₂ nucleotide motifs are completely or partially complementary. In certain embodiments, Z₁₀ and Z₁₁ nucleotide motifs are completely or partially complementary. In certain embodiments, the sense strand is complementary or substantially complementary to the antisense strand, and the length of the complementary region is between 16 and 23 nucleotides. In some embodiments, the complementary region is 19-21 nucleotides in length. In some embodiments, wherein the length of the sense strand does not exceed 35 nucleotides, including a region complementary to the antisense strand that includes at least 15, 16, 17, 18, or 19 nucleotides.

[0007] In some embodiments, the dsRNA agent comprises at least one modified nucleotide. In certain embodiments, all or substantially all nucleotides of the antisense strand are modified nucleotides. In some embodiments, at least one modified nucleotide includes: a 2′-O-methyl nucleotide, a 2′-fluoro nucleotide, a 2′-deoxynucleotide, a 2′,3′-seco nucleotide mimic, a locked nucleotide, an unlocked nucleic acid (UNA) nucleotide, a glycol nucleic acid nucleotide (GNA), a 2′-F-arabinose nucleotide, a 2′-methoxyethyl nucleotide, an abasic nucleotide, a ribitol, a reverse nucleotide, a reverse abasic nucleotide, a reverse 2′-OMe nucleotide, a reverse 2′-deoxynucleotide, a 2′-amino modified nucleotide, a 2′-alkyl modified nucleotide, a morpholino nucleotide and a 3′-OMe nucleotide, a nucleotide including 5′-phosphorothioate group, or a terminal nucleotide linked to a cholesterol derivative or a dodecanoic acid bisdecylamide group, a 2′-amino modified nucleotide, a phosphoramidate, or a non-natural base comprising nucleotide. In some embodiments, the antisense strand comprises 15 or more modified nucleotides independently selected from 2′-O-methyl nucleotides and 2′-fluoro nucleotides, wherein there are less than six 2′-fluoro nucleotide modified nucleotides. In some embodiments, the antisense strand comprises three or five 2′-fluoro nucleotides, preferably, the antisense strand comprises five 2′-fluoro nucleotides. In some embodiments, the sense strand comprises 15 or more modified nucleotides independently selected from 2′-O-methyl nucleotides and 2′-fluoro nucleotides, wherein there are less than four 2′-fluoro nucleotide modified nucleotides. In certain embodiments, the sense strand comprises three 2′-fluoro nucleotides. In some embodiments, the antisense strand comprises 15 or more modified nucleotides independently selected from 2′-O-methyl nucleotides and 2′-fluoro nucleotides, wherein at least 16 modified nucleotides are 2′-O-methyl nucleotides and positions 2, 7, 12, 14 and/or 16 at the 5′-end of the antisense strand are 2′-fluoro nucleotide modified nucleotides (counting from the first paired nucleotide at the 5′-end of the antisense strand). In some embodiments, the sense strand comprises 15 or more modified nucleotides independently selected from 2′-O-methyl nucleotides and 2′-fluoro nucleotides, wherein at least 18 modified nucleotides are 2′-O-methyl nucleotides and positions 9, 11 and/or 13 at the 3′-end of the sense strand are 2′-fluoro nucleotide modified nucleotides (counting from the first paired nucleotide of the 3′-end of the sense strand). In some embodiments, the antisense strand includes 2′-fluoro modified nucleotides at positions 2, 7, 12, 14 and 16 of the antisense strand in the direction from the 5′-end to the 3′-end; counting from the first paired nucleotide at the 5′-end of the antisense strand, the nucleotides at other positions in each antisense strand are independently non-fluoro modified nucleotides. In some embodiments, the antisense strand comprises 2′-fluoro modified nucleotides at positions 2, 5, 12, 14 and 18 of the antisense strand in the direction from the 5′-end to the 3′-end, counting from the first paired nucleotide at the 5′-end of the antisense strand, and each nucleotide at the other position in the antisense strand is independently a non-fluoro modified nucleotide. In some embodiments, the sense strand comprises 2′-fluoro modified nucleotides at inucleotide positions 9, 11 and 13 of the sense strand in the direction from the 3′-end to the 5′-end, counting from the first paired nucleotide at the 3′-end of the sense strand, and each nucleotide at the other position in the sense strand is independently a non-fluoro modified nucleotide. In some embodiments, the dsRNA agent comprises an E-vinyl phosphonate nucleotide at the 5′-end of the guide strand. In certain embodiments, the dsRNA agent comprises at least one phosphorothioate internucleoside linkage. In certain embodiments, the sense strand comprises at least one phosphorothioate internucleoside linkage. In some embodiments, the antisense strand comprises at least one phosphorothioate internucleoside linkage. In some embodiments, the sense strand comprises 1, 2, 3, 4, 5, or 6 phosphorothioate internucleoside linkages. In some embodiments, the antisense strand comprises 1, 2, 3, 4, 5, or 6 phosphorothioate internucleoside linkages. In certain embodiments, all or substantially all nucleotides of the sense and antisense strands are modified nucleotides. In some embodiments, the modified sense strand is the modified sense strand sequence listed in Tables 2-3. In some embodiments, the modified antisense strand is the modified antisense strand sequence listed in Tables 2-3. In certain embodiments, the sense strand is complementary or substantially complementary to the antisense strand, and the length of the complementary region is between 16 and 23 nucleotides. In some embodiments, the complementary region is 19-21 nucleotides in length. In some embodiments, the complementary region is 14, 15, 16, 17, 18, 19, 20, 21, 22, 23, 24, 25, 26, 27, 28, 29, or 30 nucleotides in length. In some embodiments, each strand is no longer than 40 nucleotides in length. In some embodiments, each strand is no longer than 30 nucleotides in length. In some embodiments, each strand is no longer than 25 nucleotides in length. In some embodiments, each strand is no longer than 23 nucleotides in length. In certain embodiments, the dsRNA agent comprises at least one modified nucleotide and further comprises one or more targeting groups or linking groups. In some embodiments, one or more targeting groups or linking groups are conjugated to the sense strand. In some embodiments, the targeting groups or linking groups comprise N-acetyl-galactosamine (GalNAc). In some embodiments, the targeting moieties of the targeting groups have the following structural fragments,

[chemical structure]

p is 1 or 2.

[0008] In some embodiments, the targeting groups have the following structures:

[chemical structure]

[chemical structure]

[chemical structure]

[chemical structure]

[chemical structure]

[chemical structure]

[chemical structure]

[chemical structure]

[chemical structure]

[chemical structure]

[chemical structure]

[chemical structure]

[chemical structure]

[0009] In certain embodiments, the dsRNA agent comprises a targeting group conjugated to the 5′-end of the sense strand. In some embodiments, the dsRNA agent comprises a targeting group conjugated to the 3′-end of the sense strand. In some embodiments, the antisense strand comprises one reverse abasic residue at the 3′-end. In certain embodiments, the sense strand comprises one or two reverse abasic residues at the 3′-end or/and 5′-end. In certain embodiments, the sense strand comprises one or two isomannitol residues at the 3′-end or/and 5′-end. In certain embodiments, the sense strand independently comprises one isomannitol residue at the 3′-end and 5′-end, respectively. In some embodiments, the sense chain independently comprises one isomannitol residue at the 3′-end and the 5′-end respectively, and further comprises a 5′-end conjugated targeting group, preferably GLS-15 as described above. In some embodiments, the dsRNA agent has two blunt ends. In some embodiments, at least one strand comprises a 3′ overhang having at least 1 nucleotide. In some embodiments, at least one strand comprises a 3′ overhang having at least 2 nucleotide.

[0010] In certain embodiments, a double-stranded ribonucleic acid (dsRNA) agent for inhibiting LPA (Apo (a)) expression comprises a sense strand and an antisense strand, and the nucleotide positions 2 to 18 in the antisense strand comprise a region complementary to an LPA RNA transcript, the antisense strand is fully or partially complementary to the sense strand, and the agent optionally comprises a targeting ligand, wherein each strand is 14 to 30 nucleotides in length, wherein the sense strand sequence may be represented by formula (I):

(I)
5′-(N′L)_{n′}N′_{L}N′_{L}N′_{L}N′_{N1}N′_{N2}N′_{F}N′_{L}N′_{F}N′_{L}
N′_{N3}N′_{N4}N′_{L}N′_{L}N′_{L}N′_{L}N′_{L}N′_{L}(N′_{L})_{m′}-3′

where: each N′_{F} represents a 2′-fluoro modified nucleotide; each of N′_{N1}, N′_{N2}, N′_{N3} and N′_{N4} independently represents a modified or unmodified nucleotide; each N′_{L} independently represents a modified or unmodified nucleotide but not a 2′-fluoro modified nucleotide, n′ is an integer of 0-7 and m′ is an integer of 0-3. In some embodiments, each N′_{N3} represents a 2′-fluoro modified nucleotide, N′_{N1}, N′_{N2} and N′_{N4} independently represent a modified or unmodified nucleotide but does not represent 2′-fluoro modified nucleotides, and m is 1. In some embodiments, each N′_{N4} represents a 2′-fluoro modified nucleotide, N′_{N1}, N′_{N2} and N′_{N3} independently represent a modified or unmodified nucleotide but does not represent 2′-fluoro modified nucleotides, and m is 1. In some embodiments, n′ is 3 and m′ is 1; or n′ is 0 and m′ is 0; or n′ is 3 and m′ is 3. In certain embodiments, there are only three 2′-fluoro modified nucleotides in formula (I).

[0011] In certain embodiments, the present invention relates to an unlocked nucleic acid (UNA) oligomer for therapeutic use. An unlocked nucleic acid (UNA) is an acyclic analog of RNA in which the bond between the C2′ and C3′ atoms of the ribose ring has been broken. It has been demonstrated that incorporation of UNA is well tolerated for the siRNA gene silencing activity and even enhances the siRNA gene silencing activity in some cases (Meghan A. et al. “Locked vs. unlocked nucleic acids (LNA vs. UNA): contrasting structures work towards common therapeutic goals”. Chem. Soc. Rev., 2011, 40, 5680-5689).

[0012] UNA is a thermally labile modification, and substitution of ribonucleotides with UNA reduces base pairing strength and duplex stability. Strategically placing UNA in the seed region of the siRNA antisense strand reduces off-target activity in the mechanism of gene silencing mediated by microRNA (miRNA). MiRNAs identify target genes primarily by base pairing between the antisense seed region (positions 2-8 starting from the 5′-end) and the target mRNA for gene suppression. Each miRNA potentially regulates a large number of genes. The siRNA antisense strands loaded by RNA-induced silencing complexes (RISCs) can also potentially regulate a large number of unintended genes through miRNA-mediated mechanisms. Thus, incorporation of thermally labile nucleotides, such as UNA, in the seed region of siRNA can reduce off-target activity (Lam J K, Chow M Y, Zhang Y, Leung S W. siRNA Versus miRNA as Therapeutics for Gene Silencing. Mol Ther Nucleic Acids. 2015 Sep. 15; 4(9):e252. doi: 10.1038/mtna.2015.23. PMID: 26372022; PMCID: PMC4877448.). Specifically, such RNA oligonucleotides or complexes of RNA oligonucleotides comprise at least one UNA nucleotide monomer in the seed region (Narendra Vaish et al. “Improved specificity of gene silencing by siRNAs containing unlocked nucleobase analog”. Nucleic Acids Research, 2011, Vol. 39, No. 5 1823-1832).

[0013] According to the present technical solution, potential advantages of incorporating UNA in RNA oligonucleotides or complexes of RNA oligonucleotides include, but are not limited to:

[0014] 1. The off-target activity was reduced. The addition of UNA in the siRNA seed region reduces the base pairing strength in the seed region, thereby reducing the potential off-target activity caused by the micro-RNA mechanism.

[0015] 2. UNA was well tolerated in terms of siRNA activity. In some cases, UNA can lead to enhanced activity.

[0016] Exemplary UNA monomers that may be used in the present technical solution include, but are not limited to:

[chemical structure]

[0017] According to one aspect of the present invention, a composition is provided comprising any embodiment of the dsRNA agent described above of the present invention. In certain embodiments, the composition further comprises a pharmaceutically acceptable carrier. In some embodiments, the composition further comprises one or more additional therapeutic agents, such as a HMg Co-A reductase inhibitor (statins), ezetimibe, a PCSK-9 inhibitor, a CTEP inhibitor, an ANGPTL3-targeting therapy, an AGT-targeting therapy, an APOC3-targeting therapy and niacin, or any combination thereof. In some embodiments, the composition is packaged in a kit, container, packaging, dispenser, pre-filled syringe, or vial. In some embodiments, compositions are formulated for subcutaneous administration or are formulated for intravenous (IV) administration.

[0018] According to another aspect of the present invention, a cell is provided that comprises any embodiment of the dsRNA agent described above of the present invention. In some embodiments, the cell is a mammalian cell and optionally a human cell.

[0019] According to another aspect of the present invention, a method for inhibiting LPA gene expression in a cell is provided, the method comprises: (i) preparing a cell containing any embodiment of an effective amount of the dsRNA agent described above or the composition described above of the present invention. In certain embodiments, the method further comprises: (ii) maintaining the prepared cell for sufficient time to obtain degradation of the mRNA transcript of the LPA gene, thereby inhibiting the expression of the LPA gene in the cell. In some embodiments, the cell is in the subject and the dsRNA agent is administered subcutaneously to the subject. In some embodiments, the cell is in the subject and the dsRNA agent is administered to the subject via IV administration. In certain embodiments, the method further comprises evaluating the inhibitory effect on the LPA gene after administration of a dsRNA agent to a subject, wherein the means for evaluation includes: (i) determining one or more physiological characteristics of an LPA-related disease or condition in the subject, and (ii) comparing the identified physiological characteristics with baseline physiological characteristics of the LPA-related disease or condition before treatment and/or control physiological characteristics of the LPA-related disease or condition, wherein the comparison results indicate the presence or absence of inhibition of LPA gene expression in the subject. In some embodiments, the identified physiological characteristic is the Lp(a) level in the blood. A decrease in LPA level in blood indicates a decrease in LPA gene expression in the subject.

[0020] According to another aspect of the present invention, a method of inhibiting LPA gene expression in a subject is provided, the method comprises administrating an effective amount of embodiments of the dsRNA agent described above or embodiments of the composition described above to the subject. In some embodiments, the dsRNA agent is subcutaneously administered to the subject. In certain embodiments, the dsRNA agent is administered to the subject via IV administration. In some embodiments, the method further comprises evaluating the inhibitory effect on the LPA gene after administration of a dsRNA agent, wherein the means for evaluation includes: (i) determining one or more physiological characteristics of an LPA-related disease or condition in the subject, and (ii) comparing the identified physiological characteristics with baseline physiological characteristics of the LPA-related disease or condition before treatment and/or control physiological characteristics of the LPA-related disease or condition, wherein the comparison results indicate the presence or absence of inhibition of LPA gene expression in the subject. In some embodiments, the identified physiological characteristic is the Lp(a) level in the blood. A decrease in LPA level in blood indicates a decrease in LPA gene expression in the subject.

[0021] According to another aspect of the present invention, provided is a method of treating a disease or condition associated with an LPA protein comprising administering to a subject an effective amount of any embodiment of the aforementioned dsRNA agent of the present invention or any embodiment of the aforementioned composition of the present invention to inhibit LPA gene expression. In certain embodiments, the LPA-related disorder is a cardiovascular disease, wherein the cardiovascular disease includes Berger's disease, peripheral arterial disease, coronary artery disease, metabolic syndrome, acute coronary syndrome, aortic stenosis, aortic regurgitation, aortic dissection, retinal artery occlusion, cerebrovascular diseases, mesenteric ischemia, superior mesenteric artery occlusion, renal artery stenosis, stable/unstable angina, acute coronary syndrome, heterozygous or homozygous familial hypercholesterolemia, hyperapolipoprotein beta lipoproteinemia, cerebrovascular atherosclerosis, cerebrovascular diseases and venous thrombosis, stroke, atherosclerosis, thrombosis, coronary heart diseases or aortic stenosis and/or any other diseases or pathologies related to elevated levels of Lp(a)-containing particles. In some embodiments, the method further comprises administering an additional therapeutic regimen to the subject. In some embodiments, the additional therapeutic regimen comprises treatment of LPA-related diseases or conditions In some embodiments, additional therapeutic regimens include: administering one or more LPA antisense polynucleotides of the present invention to a subject; administering a non-LPA dsRNA therapeutic agent to a subject; and effecting a behavioral modifications in a subject. In some embodiments, the non-LPA dsRNA therapeutic agent is one of additional therapeutic agents such as a HMg Co-A reductase inhibitor (statins), ezetimibe, a PCSK-9 inhibitor, a CTEP inhibitor, an ANGPTL3-targeting therapy, an APOC3-targeting therapy and niacin, or any combination thereof.

[0022] In some embodiments, the dsRNA agent is subcutaneously administered to the subject. In certain embodiments, the dsRNA agent is administered to the subject via IV administration. In some embodiments, the method further comprises determining the efficacy of the administered double-stranded ribonucleic acid (dsRNA) agent in the subject. In some embodiments, means of determining the efficacy of a treatment in a subject include: (i) determining one or more physiological characteristics of an LPA-related disease or condition in the subject; (ii) comparing the determined physiological profile to the baseline physiological characteristics of the LPA-related disease or condition before treatment, wherein the comparison results indicate one or more of the presence, absence, and levels of efficacy of the double-stranded ribonucleic acid (dsRNA) agent administered to the subject. In some embodiments, the identified physiological characteristic is the Lp(a) level in the blood. The decrease in LPA level in the blood indicates the existence of the effectiveness of the administration of double-stranded ribonucleic acid (dsRNA) agent to the subject.

[0023] According to another aspect of the present invention, provided is a method of reducing the LPA protein level in a subject compared to the baseline level of the LPA protein in the subject before treatment, the method comprises administering to the subject an effective amount of any embodiment of the aforementioned dsRNA agent of the present invention or any embodiment of the aforementioned composition of the present invention to reduce the level of LPA gene expression. In some embodiments, the dsRNA agent is administered subcutaneously to the subject or administered to the subject via IV.

[0024] According to another aspect of the present invention, provided is a method of altering the physiological characteristics of an LPA-related disease or condition in a subject compared to the baseline physiological characteristics of the LPA-related disease or condition in the subject before treatment, the method comprises administering to the subject an effective amount of any embodiment of the aforementioned dsRNA agent of the present invention or any embodiment of the aforementioned composition of the present invention to alter the physiological characteristics of the LPA-related disease or condition in the subject. In some embodiments, the dsRNA agent is administered subcutaneously to the subject or administered to the subject via IV. In certain embodiments, the physiological characteristic is the Lp(a) level in the blood.

### Description of Sequences

[0025] Duplex AV00122 to AD00484-1, AD00474-2, AV01867-AV01968 are shown in Table 1 and their sense strand sequences are shown.

[0026] Duplex AV00122 to AD00484-1, AD00474-2, AV01867-AV01968 are shown in Table 1 and their antisense strand sequences are shown.

[0027] In the sequence shown in Table 2, chemical modifications are indicated as: capital: 2′-fluoro; lowercase: 2′-OMe; phosphorothioate: *.

[0028] In the sequences shown in Table 3, the delivery molecule used in the in vivo study is denoted as “GLO-0” at the 3′-end of each sense strand. The delivery molecule used in the in vivo study is denoted as “GLS-5” or “GLS-15” at the 5′-end of each sense strand, and chemical modifications are indicated as: capital: 2′-fluoro; lowercase: 2′-OMe; phosphorothioate: *, and unlocked nucleic acid: UNA.

[0029] The following is the mRNA sequence of human Lp(a) (SEQ ID NO: 1): NM_005577.4 Homo sapiens lipoprotein(a) (LPA), mRNA

GTAAGTCAACAATGTCCTGGGATTGGGACACACTTTCTGGGCACTG
CTGGCCAGTCCCAAAATGGAACATAAGGAAGTGGTTCTTCTACTT
CTTTTATTTCTGAAATCAGCAGCACCTGAGCAAAGCCATGTGGTC
CAGGATTGCTACCATGGTGATGGACAGAGTTATCGAGGCACGTAC
TCCACCACTGTCACAGGAAGGACCTGCCAAGCTTGGTCATCTATG
ACACCACATCAACATAATAGGACCACAGAAAACTACCCAAATGCT
GGCTTGATCATGAACTACTGCAGGAATCCAGATGCTGTGGCAGCT
CCTTATTGTTATACGAGGGATCCCGGTGTCAGGTGGGAGTACTGC
AACCTGACGCAATGCTCAGACGCAGAAGGGACTGCCGTCGCGCCT
CCGACTGTTACCCCGGTTCCAAGCCTAGAGGCTCCTTCCGAACAA
GCACCGACTGAGCAAAGGCCTGGGGTGCAGGAGTGCTACCATGGT
AATGGACAGAGTTATCGAGGCACATACTCCACCACTGTCACAGGA
AGAACCTGCCAAGCTTGGTCATCTATGACACCACACTCGCATAGT
CGGACCCCAGAATACTACCCAAATGCTGGCTTGATCATGAACTAC
TGCAGGAATCCAGATGCTGTGGCAGCTCCTTATTGTTATACGAGG
GATCCCGGTGTCAGGTGGGAGTACTGCAACCTGACGCAATGCTCA
GACGCAGAAGGGACTGCCGTCGCGCCTCCGACTGTTACCCCGGTT
CCAAGCCTAGAGGCTCCTTCCGAACAAGCACCGACTGAGCAAAGG
CCTGGGGTGCAGGAGTGCTACCATGGTAATGGACAGAGTTATCGA
GGCACATACTCCACCACTGTCACAGGAAGAACCTGCCAAGCTTGG
TCATCTATGACACCACACTCGCATAGTCGGACCCCAGAATACTAC
CCAAATGCTGGCTTGATCATGAACTACTGCAGGAATCCAGATGCT
GTGGCAGCTCCTTATTGTTATACGAGGGATCCCGGTGTCAGGTGG
GAGTACTGCAACCTGACGCAATGCTCAGACGCAGAAGGGACTGCC
GTCGCGCCTCCGACTGTTACCCCGGTTCCAAGCCTAGAGGCTCCT
TCCGAACAAGCACCGACTGAGCAGAGGCCTGGGGTGCAGGAGTGC
TACCACGGTAATGGACAGAGTTATCGAGGCACATACTCCACCACT
GTCACTGGAAGAACCTGCCAAGCTTGGTCATCTATGACACCACAC
TCGCATAGTCGGACCCCAGAATACTACCCAAATGCTGGCTTGATC
ATGAACTACTGCAGGAATCCAGATGCTGTGGCAGCTCCTTATTGT
TATACGAGGGATCCCGGTGTCAGGTGGGAGTACTGCAACCTGACG
CAATGCTCAGACGCAGAAGGGACTGCCGTCGCGCCTCCGACTGTT
ACCCCGGTTCCAAGCCTAGAGGCTCCTTCCGAACAAGCACCGACT
GAGCAAAGGCCTGGGGTGCAGGAGTGCTACCATGGTAATGGACAG
AGTTATCGAGGCACATACTCCACCACTGTCACAGGAAGAACCTGC
CAAGCTTGGTCATCTATGACACCACACTCGCATAGTCGGACCCCA
GAATACTACCCAAATGCTGGCTTGATCATGAACTACTGCAGGAAT
CCAGATGCTGTGGCAGCTCCTTATTGTTATACGAGGGATCCCGGT
GTCAGGTGGGAGTACTGCAACCTGACGCAATGCTCAGACGCAGAA
GGGACTGCCGTCGCGCCTCCGACTGTTACCCCGGTTCCAAGCCTA
GAGGCTCCTTCCGAACAAGCACCGACTGAGCAAAGGCCTGGGGTG
CAGGAGTGCTACCATGGTAATGGACAGAGTTATCGAGGCACATAC
TCCACCACTGTCACAGGAAGAACCTGCCAAGCTTGGTCATCTATG
ACACCACACTCGCATAGTCGGACCCCAGAATACTACCCAAATGCT
GGCTTGATCATGAACTACTGCAGGAATCCAGATGCTGTGGCAGCT
CCTTATTGTTATACGAGGGATCCCGGTGTCAGGTGGGAGTACTGC
AACCTGACGCAATGCTCAGACGCAGAAGGGACTGCCGTCGCGCCT
CCGACTGTTACCCCGGTTCCAAGCCTAGAGGCTCCTTCCGAACAA
GCACCGACTGAGCAAAGGCCTGGGGTGCAGGAGTGCTACCATGGT
AATGGACAGAGTTATCGAGGCACATACTCCACCACTGTCACAGGA
AGAACCTGCCAAGCTTGGTCATCTATGACACCACACTCGCATAGT
CGGACCCCAGAATACTACCCAAATGCTGGCTTGATCATGAACTAC
TGCAGGAATCCAGATGCTGTGGCAGCTCCTTATTGTTATACGAGG
GATCCCGGTGTCAGGTGGGAGTACTGCAACCTGACGCAATGCTCA
GACGCAGAAGGGACTGCCGTCGCGCCTCCGACTGTTACCCCGGTT
CCAAGCCTAGAGGCTCCTTCCGAACAAGCACCGACTGAGCAGAGG
CCTGGGGTGCAGGAGTGCTACCACGGTAATGGACAGAGTTATCGA
GGCACATACTCCACCACTGTCACTGGAAGAACCTGCCAAGCTTGG
TCATCTATGACACCACACTCGCATAGTCGGACCCCAGAATACTAC
CCAAATGCTGGCTTGATCATGAACTACTGCAGGAATCCAGATCCT
GTGGCAGCCCCTTATTGTTATACGAGGGATCCCAGTGTCAGGTGG
GAGTACTGCAACCTGACACAATGCTCAGACGCAGAAGGGACTGCC
GTCGCGCCTCCAACTATTACCCCGATTCCAAGCCTAGAGGCTCCT
TCTGAACAAGCACCAACTGAGCAAAGGCCTGGGGTGCAGGAGTGC
TACCACGGAAATGGACAGAGTTATCAAGGCACATACTTCATTACT
GTCACAGGAAGAACCTGCCAAGCTTGGTCATCTATGACACCACAC
TCGCATAGTCGGACCCCAGCATACTACCCAAATGCTGGCTTGATC
AAGAACTACTGCCGAAATCCAGATCCTGTGGCAGCCCCTTGGTGT
TATACAACAGATCCCAGTGTCAGGTGGGAGTACTGCAACCTGACA
CGATGCTCAGATGCAGAATGGACTGCCTTCGTCCCTCCGAATGTT
ATTCTGGCTCCAAGCCTAGAGGCTTTTTTTGAACAAGCACTGACT
GAGGAAACCCCCGGGGTACAGGACTGCTACTACCATTATGGACAG
AGTTACCGAGGCACATACTCCACCACTGTCACAGGAAGAACTTGC
CAAGCTTGGTCATCTATGACACCACACCAGCATAGTCGGACCCCA
GAAAACTACCCAAATGCTGGCCTGACCAGGAACTACTGCAGGAAT
CCAGATGCTGAGATTCGCCCTTGGTGTTACACCATGGATCCCAGT
GTCAGGTGGGAGTACTGCAACCTGACACAATGCCTGGTGACAGAA
TCAAGTGTCCTTGCAACTCTCACGGTGGTCCCAGATCCAAGCACA
GAGGCTTCTTCTGAAGAAGCACCAACGGAGCAAAGCCCCGGGGTC
CAGGATTGCTACCATGGTGATGGACAGAGTTATCGAGGCTCATTC
TCTACCACTGTCACAGGAAGGACATGTCAGTCTTGGTCCTCTATG
ACACCACACTGGCATCAGAGGACAACAGAATATTATCCAAATGGT
GGCCTGACCAGGAACTACTGCAGGAATCCAGATGCTGAGATTAGT
CCTTGGTGTTATACCATGGATCCCAATGTCAGATGGGAGTACTGC
AACCTGACACAATGTCCAGTGACAGAATCAAGTGTCCTTGCGACG
TCCACGGCTGTTTCTGAACAAGCACCAACGGAGCAAAGCCCCACA
GTCCAGGACTGCTACCATGGTGATGGACAGAGTTATCGAGGCTCA
TTCTCCACCACTGTTACAGGAAGGACATGTCAGTCTTGGTCCTCT
ATGACACCACACTGGCATCAGAGAACCACAGAATACTACCCAAAT
GGTGGCCTGACCAGGAACTACTGCAGGAATCCAGATGCTGAGATT
CGCCCTTGGTGTTATACCATGGATCCCAGTGTCAGATGGGAGTAC
TGCAACCTGACGCAATGTCCAGTGATGGAATCAACTCTCCTCACA
ACTCCCACGGTGGTCCCAGTTCCAAGCACAGAGCTTCCTTCTGAA
GAAGCACCAACTGAAAACAGCACTGGGGTCCAGGACTGCTACCGA
GGTGATGGACAGAGTTATCGAGGCACACTCTCCACCACTATCACA
GGAAGAACATGTCAGTCTTGGTCGTCTATGACACCACATTGGCAT
CGGAGGATCCCATTATACTATCCAAATGCTGGCCTGACCAGGAAC
TACTGCAGGAATCCAGATGCTGAGATTCGCCCTTGGTGTTACACC
ATGGATCCCAGTGTCAGGTGGGAGTACTGCAACCTGACACGATGT
CCAGTGACAGAATCGAGTGTCCTCACAACTCCCACAGTGGCCCCG
GTTCCAAGCACAGAGGCTCCTTCTGAACAAGCACCACCTGAGAAA
AGCCCTGTGGTCCAGGATTGCTACCATGGTGATGGACGGAGTTAT
CGAGGCATATCCTCCACCACTGTCACAGGAAGGACCTGTCAATCT
TGGTCATCTATGATACCACACTGGCATCAGAGGACCCCAGAAAAC
TACCCAAATGCTGGCCTGACCGAGAACTACTGCAGGAATCCAGAT
TCTGGGAAACAACCCTGGTGTTACACAACCGATCCGTGTGTGAGG
TGGGAGTACTGCAATCTGACACAATGCTCAGAAACAGAATCAGGT
GTCCTAGAGACTCCCACTGTTGTTCCAGTTCCAAGCATGGAGGCT
CATTCTGAAGCAGCACCAACTGAGCAAACCCCTGTGGTCCGGCAG
TGCTACCATGGTAATGGCCAGAGTTATCGAGGCACATTCTCCACC
ACTGTCACAGGAAGGACATGTCAATCTTGGTCATCCATGACACCA
CACCGGCATCAGAGGACCCCAGAAAACTACCCAAATGATGGCCTG
ACAATGAACTACTGCAGGAATCCAGATGCCGATACAGGCCCTTGG
TGTTTTACCATGGACCCCAGCATCAGGTGGGAGTACTGCAACCTG
ACGCGATGCTCAGACACAGAAGGGACTGTGGTCGCTCCTCCGACT
GTCATCCAGGTTCCAAGCCTAGGGCCTCCTTCTGAACAAGACTGT
ATGTTTGGGAATGGGAAAGGATACCGGGGCAAGAAGGCAACCACT
GTTACTGGGACGCCATGCCAGGAATGGGCTGCCCAGGAGCCCCAT
AGACACAGCACGTTCATTCCAGGGACAAATAAATGGGCAGGTCTG
GAAAAAAATTACTGCCGTAACCCTGATGGTGACATCAATGGTCCC
TGGTGCTACACAATGAATCCAAGAAAACTTTTTGACTACTGTGAT
ATCCCTCTCTGTGCATCCTCTTCATTTGATTGTGGGAAGCCTCAA
GTGGAGCCGAAGAAATGTCCTGGAAGCATTGTAGGGGGGTGTGTG
GCCCACCCACATTCCTGGCCCTGGCAAGTCAGTCTCAGAACAAGG
TTTGGAAAGCACTTCTGTGGAGGCACCTTAATATCCCCAGAGTGG
GTGCTGACTGCTGCTCACTGCTTGAAGAAGTCCTCAAGGCCTTCA
TCCTACAAGGTCATCCTGGGTGCACACCAAGAAGTGAACCTCGAA
TCTCATGTTCAGGAAATAGAAGTGTCTAGGCTGTTCTTGGAGCCC
ACACAAGCAGATATTGCCTTGCTAAAGCTAAGCAGGCCTGCCGTC
ATCACTGACAAAGTAATGCCAGCTTGTCTGCCATCCCCAGACTAC
ATGGTCACCGCCAGGACTGAATGTTACATCACTGGCTGGGGAGAA
ACCCAAGGTACCTTTGGGACTGGCCTTCTCAAGGAAGCCCAGCTC
CTTGTTATTGAGAATGAAGTGTGCAATCACTATAAGTATATTTGT
GCTGAGCATTTGGCCAGAGGCACTGACAGTTGCCAGGGTGACAGT
GGAGGGCCTCTGGTTTGCTTCGAGAAGGACAAATACATTTTACAA
GGAGTCACTTCTTGGGGTCTTGGCTGTGCACGCCCCAATAAGCCT
GGTGTCTATGCTCGTGTTTCAAGGTTTGTTACTTGGATTGAGGGA
ATGATGAGAAATAATTAATTGGACGGGAGACAGAGTGAAGCATCA
ACCTACTTAGAAGCTGAAACGTGGGTAAGGATTTAGCATGCTGGA
AATAATAGACAGCAATCAAACGAAGACACTGTTCCCAGCTACCAG
CTATGCCAAACCTTGGCATTTTTGGTATTTTTGTGTATAAGCTTT
TAAGGTCTGACTGACAAATTCTGTATTAAGGTGTCATAGCTATGA
CATTTGTTAAAAATAAACTCTGCACTTATTTTGATTTGAA

### BRIEF DESCRIPTION OF THE DRAWINGS

[0030] FIG. 1 shows a schematic diagram of serum LPA protein levels in monkeys;

[0031] FIG. 2 shows a schematic diagram of serum LPA protein levels of AD00480-8 at a dose of 2 mpk in monkeys.

### DETAILED DESCRIPTION OF THE EMBODIMENTS

[0032] Some embodiments of the present invention include RNAi agents capable of inhibiting LPA (Apo(a)) gene expression, such as, but not limited to, double-stranded (ds) RNAi agents. Some embodiments of the present invention further include compositions comprising LPA RNAi agents and methods for using the compositions. The LPA RNAi agents disclosed herein may be attached to a delivery compound for delivery to cells, including delivery to hepatocytes. The pharmaceutical composition of the present invention may comprise at least one dsRNA agent and delivery compound. In some embodiments of the present invention, the delivery compound is a GalNAc-containing delivery compound. The LPA RNAi agent delivered to cells can inhibit LPA gene expression, thereby reducing the LPA protein product of the gene. The dsRNAi agent of the present invention can be used to treat LPA-related diseases and conditions. Such dsRNAi agents include, for example, the duplex AV00122 to AD00484-1, AD00474-2, AV01867-AV01968 shown in Table 1. In other embodiments, such dsRNAi agents include duplex variants, such as variants of duplex AV00122 to AD00484-1, AD00474-2, and AV01867-AV01968.

[0033] In some embodiments of the present invention, reducing LPA expression in cells or subjects treats diseases or conditions associated with LPA expression in cells or subjects, respectively. Non-limiting examples of the disease and condition that may be treated by reducing LPA expression are cardiovascular diseases, including Berger's disease, peripheral arterial disease, coronary artery disease, metabolic syndrome, acute coronary syndrome, aortic stenosis, aortic regurgitation, aortic dissection, retinal artery occlusion, cerebrovascular diseases, mesenteric ischemia, superior mesenteric artery occlusion, renal artery stenosis, stable/unstable angina, acute coronary syndrome, heterozygous or homozygous familial hypercholesterolemia, hyperapolipoprotein beta lipoproteinemia, cerebrovascular atherosclerosis, cerebrovascular diseases and venous thrombosis, stroke, atherosclerosis, thrombosis, coronary heart diseases or aortic stenosis and/or any other diseases or pathologies related to elevated levels of Lp(a)-containing particles.

[0034] How to prepare and use compositions comprising LPA single-stranded (ssRNA) and double-stranded (dsRNA) agents to inhibit LPA gene expression, and compositions and methods for treating diseases and conditions caused or regulated by LPA gene expression are described below. The term “RNAi” is also known in the art and may be referred to as “siRNA”.

[0035] As used herein, the term “RNAi” refers to agents that contain RNA and mediate targeted cleavage of RNA transcripts through the RNA-induced silencing complex (RISC) pathway. As is known in the art, the RNAi target region refers to a contiguous portion of the nucleotide sequence of an RNA molecule formed during gene transcription, which includes messenger RNA (mRNA) that is a processed product of the primary transcription product RNA. The target portion of this sequence will be at least long enough to be used as a substrate for RNAi-directed cleavage at or near that portion. A target sequence may be 8-30 nucleotides (inclusive) in length, 10-30 nucleotides (inclusive) in length, 12-25 nucleotides (inclusive) in length, 15-23 nucleotides (inclusive) in length, 16-23 nucleotides (inclusive) in length, or 18-23 nucleotides (inclusive) in length, and include all shorter lengths within each prescribed range. In some embodiments of the present invention, the target sequence is 9, 10, 11, 12, 13, 14, 15, 16, 17, 18, 19, 20, 21, 22, 23, 24, 25 or 26 nucleotides in length. In certain embodiments, the length of the target sequence is between 9 and 26 nucleotides (inclusive), including all sub-ranges and integers therebetween. For example, while not intended to be limiting, in some embodiments of the present invention, the target sequence is 8, 9, 10, 11, 12, 13, 14, 15, 16, 17, 18, 19, 20, 21, 22, 23, 24, 25, 26, 27, 28, 29, or 30 nucleotides in length, which is completely or at least substantially complementary to at least a portion of the RNA transcript of the LPA gene. Some aspects of the present invention include pharmaceutical compositions comprising one or more LPA dsRNA agents and pharmaceutically acceptable carriers. In some embodiments of the present invention, LPA RNAi as described herein inhibits the expression of LPA protein.

[0036] As used herein, “dsRNA agent” refers to a composition containing RNA or RNA-like (e.g., chemically modified RNA) oligonucleotide molecules capable of degrading target mRNA transcripts or inhibiting translation of target mRNA transcripts. Although not wishing to be limited to particular theories, a dsRNA agent of the present invention may function by an RNA interference mechanism (i.e., inducing the production of RNA interference by interacting with an RNA interference pathway mechanism in mammalian cells (RNA-induced silencing complex or RISC)), or by any alternative mechanism or pathway. Methods for achieving gene silencing in plant, invertebrate and vertebrate cells are well known in the art (see, for example, Sharp et al., Genes Dev. 2001, 15:485; Bernstein, et al., (2001) Nature 409:363; Nykanen, et al., (2001) Cell 107:309; and Elbashir, et al., (2001) Genes Dev. 15:188)), the respective disclosures of which are incorporated herein by reference in their entirety. Gene silencing means known in the art may be used in conjunction with the disclosures provided herein to achieve inhibition of expression of LPA.

[0037] The dsRNA agent disclosed herein consists of a sense strand and an antisense strand, and includes but is not limited to: short interfering RNA (siRNA), RNAi agent, microRNA (miRNA), short hairpin RNA (shRNA), and a Dicer substrate. The antisense strand of the dsRNA agent described herein is at least partially complementary to the targeted mRNA, and it is understood in the art that dsRNA duplex structures of various lengths can be used to inhibit target gene expression. For example, dsRNAs with duplex structures of 19, 20, 21, 22 and 23 base pairs are known to efficiently induce RNA interference (Elbashir et al., EMBO 2001, 20: 6877-6888). It is also known in the art that shorter or longer RNA duplex structures can also effectively induce RNA interference. The LPA dsRNA in certain embodiments of the present invention may comprise at least one strand of at least 21 nt in length, or the duplex may have a length minus 1, 2, 3 nt or less based on the length of one of any of the sequences listed in Tables 1-3. Decreasing 4 nucleotides at one or both ends of the dsRNA can also be effective compared to the dsRNAs listed in Tables 1-3, respectively. In some embodiments of the present invention, an LPA dsRNA agent may have partial sequences of at least 15, 16, 17, 18, 19, 20 or more contiguous nucleotides from one or more sequences of Tables 1-3, and their ability to inhibit LPA gene expression differs by no more than 5%, 10%, 15%, 20%, 25% or 30% from the level of inhibition produced by dsRNA comprising the full sequence (herein also referred to as “parent” sequences).

[0038] Certain embodiments of compositions and methods of the present invention include single-stranded RNA in compositions and/or administrating single-stranded RNA to a subject. For example, the antisense strands listed in any of Tables 1-3 may be used as or within a composition which, when administered to a subject, reduces the expression of the LPA polypeptide and/or the LPA gene in the subject. Tables 1-3 show the antisense strand and sense strand core extension base sequences of some LPA dsRNA agents. Single-stranded antisense molecules that may be included in certain compositions of the present invention and/or administered in certain methods of the present invention are referred to herein as “single-stranded antisense agent” or “antisense polynucleotide agent”. Single-stranded sense molecules that can be included in certain compositions and/or administered in certain methods of the present invention are referred to herein as “single-stranded sense agent” or “sense polynucleotide agent”. The term “base sequence” is used herein to refer to polynucleotide sequences without chemical modifications or delivery compounds. For example, the sense strand shown in Table 1 corresponds to the corresponding base sequence in Table 3; but the respective chemical modifications and delivery compounds are shown in the corresponding sequences in Table 3. Sequences disclosed herein may be assigned identifiers. For example, a single-stranded sense sequence can be identified by “sense strand SS #”; a single-stranded antisense sequence can be identified by “antisense strand AS #”; and a duplex comprising a sense strand and an antisense strand can be identified by “duplex AD #”.

[0039] Table 1 includes both the sense and antisense strands and provides identification numbers for the duplex formed by the sense and antisense strands on the same row in Table 1. In some embodiments of the present invention, the antisense sequence contains either a nucleobase u or a nucleobase a at its position 1. In some embodiments of the present invention, the antisense sequence contains a nucleobase u at position 1 of the antisense sequence. As used here, the term “matching position” in a sense refers to the position in each chain that “pairs” with each other when two chains form a duplex. For example, in the 21-nucleobase sense strand and the 21-nucleobase antisense strand, the position 1 of the sense strand is in the “matching position” with the nucleobase at the position 21 of the antisense strand. In another non-limiting example, for the 23-nucleobase sense strand and the 23-nucleobase antisense strand, the nucleobase at position 2 of the sense strand is in the “matching position” with the nucleobase at the position 22 of the antisense strand. In another non-limiting example, in the 18-nucleobase sense strand and the 18-nucleobase antisense strand, the nucleobase at position 1 of the sense strand is in a matching position with the nucleobase at position 18 of the antisense strand; And the nucleobase at position 4 in the sense strand is in a matching position with the nucleobase at position 15 in the antisense strand. A technician will understand how to identify matching positions between the sense and antisense strands of double and paired strands.

[0040] A column in Table 1 represents the duplex AV #, AD # of the duplex, which contains both sense and antisense sequences in the same row in the table. For example, Table 1 discloses a duplex designated as “duplex AV00122”, which contains corresponding sense strand sequence and antisense strand sequence. Thus, each row in Table 1 identifies the duplex of the present invention, and each duplex comprises a sense sequence and an antisense sequence displayed in the same row, and the designated identifier for each duplex is displayed in the last column of the row.

[0041] In some embodiments of the method of the present invention, an RNAi agent comprising the polynucleotide sequence shown in Table 1 is administered to the subject. In some embodiments of the present invention, the RNAi agent administered to the subject comprises a duplex comprising at least one of the base sequences listed in Table 1 and comprising 0, 1, 2, 3, 4, 5, 6, 7, 8, 9, 10, 11, 12, 13, 14, 15, 16, 17, 18, 19, 20, 21, 22, 23, or 24 sequence modifications. In some embodiments of the method of the present invention, it is also included to attach RNAi agent of the polynucleotide sequence shown in Table 1 to a delivery molecule, the non-limiting example of which is a GalNAc-containing delivery compound.

TABLE 1
Antisense and sense strand sequences of LPA
RNAi agent without modification.
All sequences are shown in 5′ to 3′ directions.
The duplex AV# or AD# is the number assigned to the
duplex of two chains in the same row in the table

| | | Seq | | Sec |
|---|---|---|---|---|
| Duplex | Sense chain | ID | Antisense strand | ID |
| number | base sequence | NO | base sequence | NO |
| AV00122 | CUGGUCCAGGAUUGCUACCAA | 2 | UUGGUAGCAAUCCUGGACC | 129 |
| | | | AG | |
| AV00123 | CUGAUGGACAGAGUUAUCGAA | 3 | UUCGAUAACUCUGUCCAUC | 130 |
| | | | AG | |
| AV00124 | CAUGGACAGAGUUAUCGAGGA | 4 | UCCUCGAUAACUCUGUCCA | 131 |
| | | | UG | |
| AV00125 | GCCUGCCAAGCUUGGUCAUCA | 5 | UGAUGACCAAGCUUGGCAG | 132 |
| | | | GC | |
| AV00126 | GCUGCCAAGCUUGGUCAUCUA | 6 | UAGAUGACCAAGCUUGGCA | 133 |
| | | | GC | |
| AV00127 | CCCAAGCUUGGUCAUCUAUGA | 7 | UCAUAGAUGACCAAGCUUG | 134 |
| | | | GG | |
| AV00128 | GAAGCUUGGUCAUCUAUGACA | 8 | UGUCAUAGAUGACCAAGCU | 135 |
| | | | UC | |
| AV00129 | GACUACCCAAAUGCUGGCUUA | 9 | UAAGCCAGCAUUUGGGUAG | 136 |
| | | | UC | |
| AV00130 | GUACCCAAAUGCUGGCUUGAA | 10 | UUCAAGCCAGCAUUUGGGU | 137 |
| | | | AC | |
| AV00131 | GACCCAAAUGCUGGCUUGAUA | 11 | UAUCAAGCCAGCAUUUGGG | 138 |
| | | | UC | |
| AV00132 | GGCUCCUUAUUGUUAUACGAA | 12 | UUCGUAUAACAAUAAGGAG | 139 |
| | | | CC | |
| AV00133 | GGCCUAGAGGCUCCUUCCGAA | 13 | UUCGGAAGGAGCCUCUAGG | 140 |
| | | | CC | |
| AV00134 | GUAGAGGCUCCUUCCGAACAA | 14 | UUGUUCGGAAGGAGCCUCU | 141 |
| | | | AC | |
| AV00135 | GAAGCACCGACUGAGCAAAGA | 15 | UCUUUGCUCAGUCGGUGCU | 142 |
| | | | UC | |
| AV00136 | CGAGUGCUACCAUGGUAAUGA | 16 | UCAUUACCAUGGUAGCACU | 143 |
| | | | CG | |
| AV00137 | GGUGCUACCAUGGUAAUGGAA | 17 | UUCCAUUACCAUGGUAGCA | 144 |
| | | | CC | |
| AV00138 | GACCAUGGUAAUGGACAGAGA | 18 | UCUCUGUCCAUUACCAUGG | 145 |
| | | | UC | |
| AV00139 | GUGGUAAUGGACAGAGUUAUA | 19 | UAUAACUCUGUCCAUUACC | 146 |
| | | | AC | |
| AV00140 | GGGUAAUGGACAGAGUUAUCA | 20 | UGAUAACUCUGUCCAUUAC | 147 |
| | | | CC | |
| AV00141 | CUAAUGGACAGAGUUAUCGAA | 21 | UUCGAUAACUCUGUCCAUU | 148 |
| | | | AG | |
| AV00142 | GAGAGUUAUCGAGGCACAUAA | 22 | UUAUGUGCCUCGAUAACUC | 149 |
| | | | UC | |
| AV00143 | CAGUUAUCGAGGCACAUACUA | 23 | UAGUAUGUGCCUCGAUAAC | 150 |
| | | | UG | |
| AV00144 | GACCACGGUAAUGGACAGAGA | 24 | UCUCUGUCCAUUACCGUGG | 151 |
| | | | UC | |
| AV00145 | GACUGCAGGAAUCCAGAUCCA | 25 | UGGAUCUGGAUUCCUGCAG | 152 |
| | | | UC | |
| AV00146 | GGGCAGCCCCUUAUUGUUAUA | 26 | UAUAACAAUAAGGGGCUGC | 153 |
| | | | CC | |
| AV00147 | GAGCCCCUUAUUGUUAUACGA | 27 | UCGUAUAACAAUAAGGGGC | 154 |
| | | | UC | |
| AV00148 | GCAGUGUCAGGUGGGAGUACA | 28 | UGUACUCCCACCUGACACUG | 155 |
| | | | C | |
| AV00149 | CUACUGCAACCUGACACAAUA | 29 | UAUUGUGUCAGGUUGCAGU | 156 |
| | | | AG | |
| AV00150 | GGACACAAUGCUCAGACGCAA | 30 | UUGCGUCUGAGCAUUGUGU | 157 |
| | | | CC | |
| AV00151 | GUAGAGGCUCCUUCUGAACAA | 31 | UUGUUCAGAAGGAGCCUCU | 158 |
| | | | AC | |
| AV00152 | CAGGCUCCUUCUGAACAAGCA | 32 | UGCUUGUUCAGAAGGAGCC | 159 |
| | | | UG | |
| AV00153 | GAAGCACCAACUGAGCAAAGA | 33 | UCUUUGCUCAGUUGGUGCU | 160 |
| | | | UC | |
| AV00154 | GGGAAAUGGACAGAGUUAUCA | 34 | UGAUAACUCUGUCCAUUUC | 161 |
| | | | CC | |
| AV00155 | CAAAUGGACAGAGUUAUCAAA | 35 | UUUGAUAACUCUGUCCAUU | 162 |
| | | | UG | |
| AV00156 | GGGACAGAGUUAUCAAGGCAA | 36 | UUGCCUUGAUAACUCUGUC | 163 |
| | | | CC | |
| AV00157 | GUCAAGAACUACUGCCGAAAA | 37 | UUUUCGGCAGUAGUUCUUG | 164 |
| | | | AC | |
| AV00158 | GCAAGAACUACUGCCGAAAUA | 38 | UAUUUCGGCAGUAGUUCUU | 165 |
| | | | GC | |
| AV00159 | GAAGAACUACUGCCGAAAUCA | 39 | UGAUUUCGGCAGUAGUUCU | 166 |
| | | | UC | |
| AV00160 | GACUGCCGAAAUCCAGAUCCA | 40 | UGGAUCUGGAUUUCGGCAG | 167 |
| | | | UC | |
| AV00161 | CUACUGCAACCUGACACGAUA | 41 | UAUCGUGUCAGGUUGCAGU | 168 |
| | | | AG | |
| AV00162 | GGACACGAUGCUCAGAUGCAA | 42 | UUGCAUCUGAGCAUCGUGU | 169 |
| | | | CC | |
| AV00163 | CGACUGCUACUACCAUUAUGA | 43 | UCAUAAUGGUAGUAGCAGU | 170 |
| | | | CG | |
| AV00164 | CACUGCUACUACCAUUAUGGA | 44 | UCCAUAAUGGUAGUAGCAG | 171 |
| | | | UG | |
| AV00165 | GCUGCUACUACCAUUAUGGAA | 45 | UUCCAUAAUGGUAGUAGCA | 172 |
| | | | GC | |
| AV00166 | GACUACCAUUAUGGACAGAGA | 46 | UCUCUGUCCAUAAUGGUAG | 173 |
| | | | UC | |
| AV00167 | GCUUGCCAAGCUUGGUCAUCA | 47 | UGAUGACCAAGCUUGGCAA | 174 |
| | | | GC | |
| AV00168 | GUUGCCAAGCUUGGUCAUCUA | 48 | UAGAUGACCAAGCUUGGCA | 175 |
| | | | AC | |
| AV00169 | GAUAGUCGGACCCCAGAAAAA | 49 | UUUUUCUGGGGUCCGACUA | 176 |
| | | | UC | |
| AV00170 | GCAGGAACUACUGCAGGAAUA | 50 | UAUUCCUGCAGUAGUUCCU | 177 |
| | | | GC | |
| AV00171 | CAAUCCAGAUGCUGAGAUUCA | 51 | UGAAUCUCAGCAUCUGGAU | 178 |
| | | | UG | |
| AV00172 | CAGAUUCGCCCUUGGUGUUAA | 52 | UUAACACCAAGGGCGAAUC | 179 |
| | | | UG | |
| AV00173 | CCCCUUGGUGUUACACCAUGA | 53 | UCAUGGUGUAACACCAAGG | 180 |
| | | | GG | |
| AV00174 | GUGGUGACAGAAUCAAGUGUA | 54 | UACACUUGAUUCUGUCACC | 181 |
| | | | AC | |
| AV00175 | GAUCAAGUGUCCUUGCAACUA | 55 | UAGUUGCAAGGACACUUGA | 182 |
| | | | UC | |
| AV00176 | CGGGUCCAGGAUUGCUACCAA | 56 | UUGGUAGCAAUCCUGGACC | 183 |
| | | | CG | |
| AV00177 | GUGUCACAGGAAGGACAUGUA | 57 | UACAUGUCCUUCCUGUGAC | 184 |
| | | | AC | |
| AV00178 | CGAAGGACAUGUCAGUCUUGA | 58 | UCAAGACUGACAUGUCCUU | 185 |
| | | | CG | |
| AV00179 | CAAGGACAUGUCAGUCUUGGA | 59 | UCCAAGACUGACAUGUCCU | 186 |
| | | | UG | |
| AV00180 | CUCAGUCUUGGUCCUCUAUGA | 60 | UCAUAGAGGACCAAGACUG | 187 |
| | | | AG | |
| AV00181 | CUCCUUGGUGUUAUACCAUGA | 61 | UCAUGGUAUAACACCAAGG | 188 |
| | | | AG | |
| AV00182 | GUGGUGUUAUACCAUGGAUCA | 62 | UGAUCCAUGGUAUAACACC | 189 |
| | | | AC | |
| AV00183 | GGGUGUUAUACCAUGGAUCCA | 63 | UGGAUCCAUGGUAUAACAC | 190 |
| | | | CC | |
| AV00184 | CUUAUACCAUGGAUCCCAAUA | 64 | UAUUGGGAUCCAUGGUAUA | 191 |
| | | | AG | |
| AV00185 | GAUACCAUGGAUCCCAAUGUA | 65 | UACAUUGGGAUCCAUGGUA | 192 |
| | | | UC | |
| AV00186 | GCCUGACACAAUGUCCAGUGA | 66 | UCACUGGACAUUGUGUCAG | 193 |
| | | | GC | |
| AV00187 | GGACACAAUGUCCAGUGACAA | 67 | UUGUCACUGGACAUUGUGU | 194 |
| | | | CC | |
| AV00188 | GAAUGUCCAGUGACAGAAUCA | 68 | UGAUUCUGUCACUGGACAU | 195 |
| | | | UC | |
| AV00189 | GAUGUCCAGUGACAGAAUCAA | 69 | UUGAUUCUGUCACUGGACA | 196 |
| | | | UC | |
| AV00190 | GUGUCCAGUGACAGAAUCAAA | 70 | UUUGAUUCUGUCACUGGAC | 197 |
| | | | AC | |
| AV00191 | GGUCCAGUGACAGAAUCAAGA | 71 | UCUUGAUUCUGUCACUGGA | 198 |
| | | | CC | |
| AV00192 | GCAGUGACAGAAUCAAGUGUA | 72 | UACACUUGAUUCUGUCACU | 199 |
| | | | GC | |
| AV00193 | GAUUCUCCACCACUGUUACAA | 73 | UUGUAACAGUGGUGGAGAA | 200 |
| | | | UC | |
| AV00194 | GCCACCACUGUUACAGGAAGA | 74 | UCUUCCUGUAACAGUGGUG | 201 |
| | | | GC | |
| AV00195 | GACAGAAUACUACCCAAAUGA | 75 | UCAUUUGGGUAGUAUUCUG | 202 |
| | | | UC | |
| AV00196 | GCAGAAUACUACCCAAAUGGA | 76 | UCCAUUUGGGUAGUAUUCU | 203 |
| | | | GC | |
| AV00197 | GGAUUCGCCCUUGGUGUUAUA | 77 | UAUAACACCAAGGGCGAAU | 204 |
| | | | CC | |
| AV00198 | CAUUCGCCCUUGGUGUUAUAA | 78 | UUAUAACACCAAGGGCGAA | 205 |
| | | | UG | |
| AV00199 | GUCGCCCUUGGUGUUAUACCA | 79 | UGGUAUAACACCAAGGGCG | 206 |
| | | | AC | |
| AV00200 | CCCCUUGGUGUUAUACCAUGA | 80 | UCAUGGUAUAACACCAAGG | 207 |
| | | | GG | |
| AV00201 | GGAUGUCCAGUGACAGAAUCA | 81 | UGAUUCUGUCACUGGACAU | 208 |
| | | | CC | |
| AV00202 | GCAGAGGCUCCUUCUGAACAA | 82 | UUGUUCAGAAGGAGCCUCU | 209 |
| | | | GC | |
| AV00203 | GAUCUUGGUCAUCUAUGAUAA | 83 | UUAUCAUAGAUGACCAAGA | 210 |
| | | | UC | |
| AV00204 | GGACACAAUGCUCAGAAACAA | 84 | UUGUUUCUGAGCAUUGUGU | 211 |
| | | | CC | |
| AV00205 | CCAGUGCUACCAUGGUAAUGA | 85 | UCAUUACCAUGGUAGCACU | 212 |
| | | | GG | |
| AD0014 | CAGCCCCUUAUUGUUAUACGA | 86 | UCGUAUAACAAUAAGGGGC | 213 |
| 9 | | | UG | |
| AD0015 | AGUUAUCGAGGCUCAUUCUCA | 87 | UGAGAAUGAGCCUCGAUAA | 214 |
| 0 | | | CU | |
| AD0015 | UGACACAAUGCUCAGACGCAA | 88 | UUGCGUCUGAGCAUUGUGU | 215 |
| 1 | | | CA | |
| AD0033 | GACCCAAAUGCUGGCUUGAUA | 89 | UAUCAAGCCAGCAUUUGGG | 216 |
| 1 | | | UC | |
| AD0033 | GGGUAAUGGACAGAGUUAUCA | 90 | UGAUAACUCUGUCCAUUAC | 217 |
| 2 | | | CC | |
| AD0033 | CUAAUGGACAGAGUUAUCGAA | 91 | UUCGAUAACUCUGUCCAUU | 218 |
| 3 | | | AG | |
| AD0033 | CAGUUAUCGAGGCACAUACUA | 92 | UAGUAUGUGCCUCGAUAAC | 219 |
| 4 | | | UG | |
| AD0033 | CUACUGCAACCUGACACAAUA | 93 | UAUUGUGUCAGGUUGCAGU | 220 |
| 5 | | | AG | |
| AD0033 | CGACUGCUACUACCAUUAUGA | 94 | UCAUAAUGGUAGUAGCAGU | 22 |
| 6 | | | CG | |
| AD0033 | GUUGCCAAGCUUGGUCAUCUA | 95 | UAGAUGACCAAGCUUGGCA | 222 |
| 7 | | | AC | |
| AD0033 | CAGAUUCGCCCUUGGUGUUAA | 96 | UUAACACCAAGGGCGAAUC | 223 |
| 8 | | | UG | |
| AD0033 | CGAAGGACAUGUCAGUCUUGA | 97 | UCAAGACUGACAUGUCCUU | 224 |
| 9 | | | CG | |
| AD0034 | CUCCUUGGUGUUAUACCAUGA | 98 | UCAUGGUAUAACACCAAGG | 225 |
| 0 | | | AG | |
| AD0034 | CCCCUUGGUGUUAUACCAUGA | 99 | UCAUGGUAUAACACCAAGG | 226 |
| 1 | | | GG | |
| AD0034 | GGACACAAUGCUCAGAAACAA | 100 | UUGUUUCUGAGCAUUGUGU | 227 |
| 2 | | | CC | |
| AD0043 | CUGAUGGACAGAGUUAUCGAA | 101 | UUCGAUAACUCUGUCCAUC | 228 |
| 3 | | | AG | |
| AD0043 | GGCUCCUUAUUGUUAUACGAA | 102 | UUCGUAUAACAAUAAGGAG | 229 |
| 4 | | | CC | |
| AD0043 | GAAGCACCAACUGAGCAAAGA | 103 | UCUUUGCUCAGUUGGUGCU | 230 |
| 5 | | | UC | |
| AD0043 | GGGAAAUGGACAGAGUUAUCA | 104 | UGAUAACUCUGUCCAUUUC | 23 |
| 6 | | | CC | |
| AD0043 | GCUGCUACUACCAUUAUGGAA | 105 | UUCCAUAAUGGUAGUAGCA | 232 |
| 7 | | | GC | |
| AD0043 | CAAUCCAGAUGCUGAGAUUCA | 106 | UGAAUCUCAGCAUCUGGAU | 233 |
| 8 | | | UG | |
| AD0043 | GAUUCUCCACCACUGUUACAA | 107 | UUGUAACAGUGGUGGAGAA | 234 |
| 9 | | | UC | |
| AD0044 | GCAGAAUACUACCCAAAUGGA | 108 | UCCAUUUGGGUAGUAUUCU | 235 |
| 0 | | | GC | |
| AD0044 | GGAUUCGCCCUUGGUGUUAUA | 109 | UAUAACACCAAGGGCGAAU | 236 |
| 1 | | | CC | |
| AD0044 | CAUUCGCCCUUGGUGUUAUAA | 110 | UUAUAACACCAAGGGCGAA | 237 |
| 2 | | | UG | |
| AD0047 | CAUGGACAGAGUUAUCGAGGA | 111 | UCCUCGAUAACUCUGUCCA | 238 |
| 4 | | | UG | |
| AD0047 | GCUGCCAAGCUUGGUCAUCUA | 112 | UAGAUGACCAAGCUUGGCA | 239 |
| 5 | | | GC | |
| AD0047 | CCCAAGCUUGGUCAUCUAUGA | 113 | UCAUAGAUGACCAAGCUUG | 240 |
| 6 | | | GG | |
| AD0047 | GGUGCUACCAUGGUAAUGGAA | 114 | UUCCAUUACCAUGGUAGCA | 241 |
| 7 | | | CC | |
| AD0047 | GACCAUGGUAAUGGACAGAGA | 115 | UCUCUGUCCAUUACCAUGG | 242 |
| 8 | | | UC | |
| AD0047 | GUGGUAAUGGACAGAGUUAUA | 116 | UAUAACUCUGUCCAUUACC | 243 |
| 9 | | | AC | |
| AD0048 | GAGAGUUAUCGAGGCACAUAA | 117 | UUAUGUGCCUCGAUAACUC | 244 |
| 0 | | | UC | |
| AD0048 | CAAAUGGACAGAGUUAUCAAA | 118 | UUUGAUAACUCUGUCCAUU | 245 |
| 1 | | | UG | |
| AD0048 | GGGACAGAGUUAUCAAGGCAA | 119 | UUGCCUUGAUAACUCUGUC | 246 |
| 2 | | | CC | |
| AD0048 | GAUCAAGUGUCCUUGCAACUA | 120 | UAGUUGCAAGGACACUUGA | 247 |
| 3 | | | UC | |
| AD0048 | CGGGUCCAGGAUUGCUACCAA | 121 | UUGGUAGCAAUCCUGGACC | 248 |
| 4 | | | CG | |
| AD0048 | GUGUCACAGGAAGGACAUGUA | 122 | UACAUGUCCUUCCUGUGAC | 249 |
| 5 | | | AC | |
| AD0048 | GAUGUCCAGUGACAGAAUCAA | 123 | UUGAUUCUGUCACUGGACA | 250 |
| 6 | | | UC | |
| AD0048 | GCAGAGGCUCCUUCUGAACAA | 124 | UUGUUCAGAAGGAGCCUCU | 251 |
| 7 | | | GC | |
| AD0047 | CAUGGACAGAGUUAUCGAGGA | 125 | UCCUCGAUAACUCUGUCCA | 252 |
| 4-1 | | | UG | |
| AD0047 | GACCAUGGUAAUGGACAGAGA | 126 | UCUCUGUCCAUUACCAUGG | 253 |
| 8-1 | | | UC | |
| AD0048 | GGGACAGAGUUAUCAAGGCAA | 127 | UUGCCUUGAUAACUCUGUC | 254 |
| 2-1 | | | CC | |
| AD0048 | CGGGUCCAGGAUUGCUACCAA | 128 | UUGGUAGCAAUCCUGGACC | 255 |
| 4-1 | | | CG | |
| AD0047 | GAUGGACAGAGUUAUCGAGGU | 514 | ACCUCGAUAACUCUGUCCA | 608 |
| 4-2 | | | UC | |
| AV01867 | GAGAGUUAUCGAGGCACAUAA | 515 | UUAUGUGCCUCGAUAACUC | 609 |
| | | | UC | |
| AV01868 | GAGAGUUAUCGAGGCACAUAU | 516 | AUAUGUGCCUCGAUAACUC | 610 |
| | | | UC | |
| AV01869 | GAGAGUUAUCGAGGCACAUAC | 517 | GUAUGUGCCUCGAUAACUC | 611 |
| | | | UC | |
| AV01870 | GAGAGUUAUCGAGGCACAUAG | 518 | CUAUGUGCCUCGAUAACUC | 612 |
| | | | UC | |
| AV01871 | GUUAUCGAGGCACAUAA | 519 | UUAUGUGCCUCGAUAAC | 613 |
| AV01872 | AGUUAUCGAGGCACAUAA | 520 | UUAUGUGCCUCGAUAACU | 614 |
| AV01873 | AAGUUAUCGAGGCACAUAA | 521 | UUAUGUGCCUCGAUAACUU | 615 |
| AV01874 | UAGUUAUCGAGGCACAUAA | 522 | UUAUGUGCCUCGAUAACUA | 616 |
| AV01875 | GAGUUAUCGAGGCACAUAA | 523 | UUAUGUGCCUCGAUAACUC | 617 |
| AV01876 | CAGUUAUCGAGGCACAUAA | 524 | UUAUGUGCCUCGAUAACUG | 618 |
| AV01877 | AGAGUUAUCGAGGCACAUAA | 525 | UUAUGUGCCUCGAUAACUC | 619 |
| | | | U | |
| AV01878 | UGAGUUAUCGAGGCACAUAA | 526 | UUAUGUGCCUCGAUAACUC | 620 |
| | | | A | |
| AV01879 | GGAGUUAUCGAGGCACAUAA | 527 | UUAUGUGCCUCGAUAACUC | 621 |
| | | | C | |
| AV01880 | CGAGUUAUCGAGGCACAUAA | 528 | UUAUGUGCCUCGAUAACUC | 622 |
| | | | G | |
| AV01881 | UAGAGUUAUCGAGGCACAUAA | 529 | UUAUGUGCCUCGAUAACUC | 623 |
| | | | UA | |
| AV01882 | CAGAGUUAUCGAGGCACAUAA | 530 | UUAUGUGCCUCGAUAACUC | 624 |
| | | | UG | |
| AV01883 | AAGAGUUAUCGAGGCACAUAA | 53 | UUAUGUGCCUCGAUAACUC | 625 |
| | | | UU | |
| AV01884 | ACAGAGUUAUCGAGGCACAUA | 532 | UUAUGUGCCUCGAUAACUC | 626 |
| | A | | UGU | |
| AV01885 | GACAGAGUUAUCGAGGCACAU | 533 | UUAUGUGCCUCGAUAACUC | 627 |
| | AA | | UGUC | |
| AV01886 | GGACAGAGUUAUCGAGGCACA | | UUAUGUGCCUCGAUAACUC | |
| | UAA | 534 | UGUCC | 628 |
| AV01887 | UGGACAGAGUUAUCGAGGCAC | | UUAUGUGCCUCGAUAACUC | |
| | AUAA | 535 | UGUCCA | 629 |
| AV01888 | AUGGACAGAGUUAUCGAGGCA | 536 | UUAUGUGCCUCGAUAACUC | 630 |
| | CAUAA | | UGUCCAU | |
| AV01889 | AUGGUAAUGGACAGAGUUAUC | 537 | UUAUGUGCCUCGAUAACUC | 631 |
| | GAGGCACAUAA | | UGUCCAUUACCAU | |
| AV01890 | GAGAGUUAUCGAGGCACAUAA | 538 | UUAUGUGCCUCGAUAACUC | 632 |
| | | | UCUU | |
| AV01891 | GAGAGUUAUCGAGGCACAUAA | 539 | UUAUGUGCCUCGAUAACUC | 633 |
| | | | UCGA | |
| AV01892 | GAGAGUUAUCGAGGCACAUAA | 540 | UUAUGUGCCUCGAUAACUC | 634 |
| | | | UC | |
| AV01893 | GAGAGUUAUCGAGGCACAUAA | 541 | UUAUGUGCCUCGAUAACUC | 635 |
| | | | UC | |
| AV01894 | GAGAGUUAUCGAGGCACAUAA | 542 | UUAUGUGCCUCGAUAACUC | 636 |
| | | | UC | |
| AV01895 | GAGAGUUAUCGAGGCGCAUAA | 543 | UUAUGUGCCUCGAUAACUC | 637 |
| | | | UC | |
| AV01896 | GAGAGUUAUCGAGGCACAUUA | 544 | UAAUGUGCCUCGAUAACUC | 638 |
| | | | UC | |
| AV01897 | GAGAGUUAUCGAGGCACAUAA | 545 | UUAUGUGCCUCGAUAACUC | 639 |
| | | | UC | |
| AV01898 | GUUGCCAAGCUUGGUCAUCUA | 546 | UAGAUGACCAAGCUUGGCA | 640 |
| | | | AC | |
| AV01899 | GUUGCCAAGCUUGGUCAUCUU | 547 | AAGAUGACCAAGCUUGGCA | 641 |
| | | | AC | |
| AV01900 | GUUGCCAAGCUUGGUCAUCUC | 548 | GAGAUGACCAAGCUUGGCA | 642 |
| | | | AC | |
| AV01901 | GUUGCCAAGCUUGGUCAUCUG | 549 | CAGAUGACCAAGCUUGGCA | 643 |
| | | | AC | |
| AV01902 | CCAAGCUUGGUCAUCUA | 550 | UAGAUGACCAAGCUUGG | 644 |
| AV01903 | GCCAAGCUUGGUCAUCUA | 551 | UAGAUGACCAAGCUUGGC | 645 |
| AV01904 | AGCCAAGCUUGGUCAUCUA | 552 | UAGAUGACCAAGCUUGGCU | 646 |
| AV01905 | UGCCAAGCUUGGUCAUCUA | 553 | UAGAUGACCAAGCUUGGCA | 647 |
| AV01906 | GGCCAAGCUUGGUCAUCUA | 554 | UAGAUGACCAAGCUUGGCC | 648 |
| AV01907 | CGCCAAGCUUGGUCAUCUA | 555 | UAGAUGACCAAGCUUGGCG | 649 |
| AV01908 | AUGCCAAGCUUGGUCAUCUA | 556 | UAGAUGACCAAGCUUGGCA | 650 |
| | | | U | |
| AV01909 | UUGCCAAGCUUGGUCAUCUA | 557 | UAGAUGACCAAGCUUGGCA | 651 |
| | | | A | |
| AV01910 | GUGCCAAGCUUGGUCAUCUA | 558 | UAGAUGACCAAGCUUGGCA | 652 |
| | | | C | |
| AV01911 | CUGCCAAGCUUGGUCAUCUA | 559 | UAGAUGACCAAGCUUGGCA | 653 |
| | | | G | |
| AV01912 | UUUGCCAAGCUUGGUCAUCUA | 560 | UAGAUGACCAAGCUUGGCA | 654 |
| | | | AA | |
| AV01913 | CUUGCCAAGCUUGGUCAUCUA | 561 | UAGAUGACCAAGCUUGGCA | 655 |
| | | | AG | |
| AV01914 | AUUGCCAAGCUUGGUCAUCUA | 562 | UAGAUGACCAAGCUUGGCA | 656 |
| | | | AU | |
| AV01915 | ACUUGCCAAGCUUGGUCAUCU | 563 | UAGAUGACCAAGCUUGGCA | 657 |
| | A | | AGU | |
| AV01916 | AACUUGCCAAGCUUGGUCAUC | 564 | UAGAUGACCAAGCUUGGCA | 658 |
| | UA | | AGUU | |
| AV01917 | GAACUUGCCAAGCUUGGUCAU | | UAGAUGACCAAGCUUGGCA | |
| | CUA | 565 | AGUUC | 659 |
| AV01918 | AGAACUUGCCAAGCUUGGUCA | | UAGAUGACCAAGCUUGGCA | |
| | UCUA | 566 | AGUUCU | 660 |
| AV01919 | AAGAACUUGCCAAGCUUGGUC | 567 | UAGAUGACCAAGCUUGGCA | |
| | AUCUA | | AGUUCUU | 661 |
| AV01920 | CACAGGAAGAACUUGCCAAGC | 568 | UAGAUGACCAAGCUUGGCA | 662 |
| | UUGGUCAUCUA | | AGUUCUUCCUGUG | |
| AV01921 | GUUGCCAAGCUUGGUCAUCUA | 569 | UAGAUGACCAAGCUUGGCA | 663 |
| | | | ACUU | |
| AV01922 | GUUGCCAAGCUUGGUCAUCUA | 570 | UAGAUGACCAAGCUUGGCA | 664 |
| | | | ACGA | |
| AV01923 | GUUGCCAAGCUUGGUCAUCUA | 571 | UAGAUGACCAAGCUUGGCA | 665 |
| | | | AC | |
| AV01924 | GUUGCCAAGCUUGGUCAUCUA | 572 | UAGAUGACCAAGCUUGGCA | 666 |
| | | | AC | |
| AV01925 | GUUGCCAAGCUUGGUCAUCUA | 573 | UAGAUGACCAAGCUUGGCA | 667 |
| | | | AC | |
| AV01926 | GUUGCCAAGCUUGGUUAUCUA | 574 | UAGAUGACCAAGCUUGGCA | 668 |
| | | | AC | |
| AV01927 | GUUGCCAAGCUUGGUCAUCCA | 575 | UGGAUGACCAAGCUUGGCA | 669 |
| | | | AC | |
| AV01928 | GUUGCCAAGCUUGGUCAUCUA | 576 | UAGAUGACCAAGCUUGGCA | 670 |
| | | | AC | |
| AV01929 | CAUGGACAGAGUUAUCGAGGA | 577 | UCCUCGAUAACUCUGUCCA | 671 |
| | | | UG | |
| AV01930 | CAUGGACAGAGUUAUCGAGGU | 578 | ACCUCGAUAACUCUGUCCA | 672 |
| | | | UG | |
| AV01931 | CAUGGACAGAGUUAUCGAGGC | 579 | GCCUCGAUAACUCUGUCCA | 673 |
| | | | UG | |
| AV01932 | CAUGGACAGAGUUAUCGAGGG | 580 | CCCUCGAUAACUCUGUCCAU | 674 |
| | | | G | |
| AV01933 | GACAGAGUUAUCGAGGA | 581 | UCCUCGAUAACUCUGUC | 675 |
| AV01934 | GGACAGAGUUAUCGAGGA | 582 | UCCUCGAUAACUCUGUCC | 676 |
| AV01935 | AGGACAGAGUUAUCGAGGA | 583 | UCCUCGAUAACUCUGUCCU | 677 |
| AV01936 | UGGACAGAGUUAUCGAGGA | 584 | UCCUCGAUAACUCUGUCCA | 678 |
| AV01937 | GGGACAGAGUUAUCGAGGA | 585 | UCCUCGAUAACUCUGUCCC | 679 |
| AV01938 | CGGACAGAGUUAUCGAGGA | 586 | UCCUCGAUAACUCUGUCCG | 680 |
| AV01939 | AUGGACAGAGUUAUCGAGGA | 587 | UCCUCGAUAACUCUGUCCA | 681 |
| | | | U | |
| AV01940 | UUGGACAGAGUUAUCGAGGA | 588 | UCCUCGAUAACUCUGUCCA | 682 |
| | | | A | |
| AV01941 | GUGGACAGAGUUAUCGAGGA | 589 | UCCUCGAUAACUCUGUCCAC | 683 |
| AV01942 | CUGGACAGAGUUAUCGAGGA | 590 | UCCUCGAUAACUCUGUCCA | 684 |
| | | | G | |
| AV01943 | UAUGGACAGAGUUAUCGAGGA | 591 | UCCUCGAUAACUCUGUCCA | 685 |
| | | | UA | |
| AV01944 | GAUGGACAGAGUUAUCGAGGA | 592 | UCCUCGAUAACUCUGUCCA | 686 |
| | | | UC | |
| AV01945 | AAUGGACAGAGUUAUCGAGGA | 593 | UCCUCGAUAACUCUGUCCA | 687 |
| | | | UU | |
| AV01946 | UGAUGGACAGAGUUAUCGAGG | 594 | UCCUCGAUAACUCUGUCCA | 688 |
| | A | | UCA | |
| AV01947 | GUGAUGGACAGAGUUAUCGAG | 595 | UCCUCGAUAACUCUGUCCA | 689 |
| | GA | | UCAC | |
| AV01948 | GGUGAUGGACAGAGUUAUCGA | 596 | UCCUCGAUAACUCUGUCCA | 690 |
| | GGA | | UCACC | |
| AV01949 | UGGUGAUGGACAGAGUUAUCG | 597 | UCCUCGAUAACUCUGUCCA | 691 |
| | AGGA | | UCACCA | |
| AV01950 | AUGGUGAUGGACAGAGUUAUC | 598 | UCCUCGAUAACUCUGUCCA | 692 |
| | GAGGA | | UCACCAU | |
| AV01951 | GCUACCAUGGUGAUGGACAGA | 599 | UCCUCGAUAACUCUGUCCA | 693 |
| | GUUAUCGAGGA | | UCACCAUGGUAGC | |
| AV01952 | CAUGGACAGAGUUAUCGAGGA | 600 | UCCUCGAUAACUCUGUCCA | 694 |
| | | | UGUU | |
| AV01953 | CAUGGACAGAGUUAUCGAGGA | 601 | UCCUCGAUAACUCUGUCCA | 695 |
| | | | UGGA | |
| AV01954 | CAUGGACAGAGUUAUCGAGGA | 602 | UCCUCGAUAACUCUGUCCA | 696 |
| | | | UG | |
| | CAUGGACAGAGUUAUCGAGGA | | UCCUCGAUAACUCUGUCCA | |
| AV01955 | | 603 | UG | 697 |
| AV01956 | CAUGGACAGAGUUAUCGAGGA | | UCCUCGAUAACUCUGUCCA | |
| | | 604 | UG | 698 |
| AV01957 | CAUGGACAGAGUUAUUGAGGA | | UCCUCGAUAACUCUGUCCA | |
| | | 605 | UG | 699 |
| | | | UUCUCGAUAACUCUGUCCA | |
| AV01958 | CAUGGACAGAGUUAUCGAGAA | 606 | UG | 700 |
| | | | UCCUCGAUAACUCUGUCCA | |
| AV01959 | CAUGGACAGAGUUAUCGAGGA | 607 | UG | 701 |

[0042] Table 2 shows antisense and sense strand sequences of certain chemically modified LPA RNAi agents of the present invention. In some embodiments of the method of the present invention, RNAi agents having the polynucleotide sequences shown in Table 2 are administered to cells and/or subjects. In some embodiments of the method of the present invention, RNAi agents having the polynucleotide sequences shown in Table 2 are administered to subjects. In some embodiments of the present invention, the RNAi agent administered to the subject comprises a duplex labeled in the first column of Table 2, and sequence modifications in the sense and antisense strand sequences shown in the third and sixth columns of the same row in Table 2, respectively. In some embodiments of the method of the present invention, the sequences shown in Table 2 may be attached to (also referred to herein as “conjugated to”) compounds capable of delivering RNAi agents to the cells and/or tissues of the subject. Non-limiting examples of delivery compounds that may be used in certain embodiments of the present invention are GalNAc-containing compounds. In Table 2, the first column represents the duplex AD # of the base sequence, corresponding to Table 1. The base sequences identified by the duplex AD # not only shows the base sequences contained in the sense and antisense strands but also have the designated chemical modifications shown in the same row of Table 2. For example, the first row of Table 1 shows the sense and antisense base single-stranded sequences, which together form a duplex identified as: duplex AV00122; the duplex AV00122 listed in Table 2, as a duplex, comprises the base sequences of AV00122-SS and AV00122-AS, and comprises chemical modifications in the sense sequences and the antisense sequences shown in the third and sixth columns, respectively. The “sense strand SS #” in the second column of Table 2 is the designated identifier of the sense sequence (including modification) shown in the third column of the same row. The “antisense strand AS #” in the fifth column of Table 2 is the designated identifier of the antisense sequence (including modification) shown in the sixth column.

TABLE 2
Antisense and sense strand sequences of chemically modified
LPA RNAi agent. All sequences are shown in 5′ to 3′. These
sequences were used in some of the in vitro test studies
described herein. Chemical modifications are indicated as:
capital: 2′-fluoro; lowercase: 2′-OMe; phosphorothioate: *

| | | | SEQ | | | SEQ |
|---|---|---|---|---|---|---|
| Duplex | Sense | Sense | ID | Antisense | Antisense | ID |
| AV# | chain SS# | sequence | NO | strand AS# | sequence | NO |
| AV00122 | AV00122-SS | c*u*gguccaGgAuUgc | 256 | AV00122-AS | u*U*gguaGcaauCcUg | 340 |
| | | uacca*a | | | Gacc*a*g | |
| AV00123 | AV00123-SS | c*u*gauggaCaGaGuu | 257 | AV00123-AS | u*U*cgauAacucUgUc | 341 |
| | | aucga*a | | | Cauc*a*g | |
| AV00124 | AV00124-SS | c*a*uggacaGaGuUau | 258 | AV00124-AS | u*C*cucgAuaacUcUg | 342 |
| | | cgagg*a | | | Ucca*u*g | |
| AV00125 | AV00125-SS | g*c*cugccaAgCuUgg | 259 | AV00125-AS | u*G*augaCcaagCuUg | 343 |
| | | ucauc*a | | | Gcag*g*c | |
| AV00126 | AV00126-SS | g*c*ugccaaGcUuGgu | 260 | AV00126-AS | u*A*gaugAccaaGcUu | 344 |
| | | caucu*a | | | Ggca*g*c | |
| AV00127 | AV00127-SS | c*c*caagcuUgGuCau | 261 | AV00127-AS | u*C*auagAugacCaAg | 345 |
| | | cuaug*a | | | Cuug*g*g | |
| AV00128 | AV00128-SS | g*a*agcuugGuCaUcu | 262 | AV00128-AS | u*G*ucauAgaugAcCa | 346 |
| | | augac*a | | | Agcu*u*c | |
| AV00129 | AV00129-SS | g*a*cuacccAaAuGcu | 263 | AV00129-AS | u*A*agccAgcauUuGg | 347 |
| | | ggcuu*a | | | Guag*u*c | |
| AV00130 | AV00130-SS | g*u*acccaaAuGcUgg | 264 | AV00130-AS | u*U*caagCcagcAuUu | 348 |
| | | cuuga*a | | | Gggu*a*c | |
| AV00131 | AV00131-SS | g*a*cccaaaUgCuGgc | 265 | AV00131-AS | u*A*ucaaGccagCaUu | 349 |
| | | uugau*a | | | Uggg*u*c | |
| AV00132 | AV00132-SS | g*g*cuccuuAuUgUua | 266 | AV00132-AS | u*U*cguaUaacaAuAa | 350 |
| | | uacga*a | | | Ggag*c*c | |
| AV00133 | AV00133-SS | g*g*ccuagaGgCuCcu | 267 | AV00133-AS | u*U*cggaAggagCcUc | 351 |
| | | uccga*a | | | Uagg*c*c | |
| AV00134 | AV00134-SS | g*u*agaggcUcCuUcc | 268 | AV00134-AS | u*U*guucGgaagGaGc | 352 |
| | | gaaca*a | | | Cucu*a*c | |
| AV00135 | AV00135-SS | g*a*agcaccGaCuGag | 269 | AV00135-AS | u*C*uuugCucagUcGg | 353 |
| | | caaag*a | | | Ugcu*u*c | |
| AV00136 | AV00136-SS | c*g*agugcuAcCaUgg | 270 | AV00136-AS | u*C*auuaCcaugGuAg | 354 |
| | | uaaug*a | | | Cacu*c*g | |
| AV00137 | AV00137-SS | g*g*ugcuacCaUgGua | 271 | AV00137-AS | u*U*ccauUaccaUgGu | 355 |
| | | augga*a | | | Agca*c*c | |
| AV00138 | AV00138-SS | g*a*ccauggUaAuGga | 272 | AV00138-AS | u*C*ucugUccauUaCc | 356 |
| | | cagag*a | | | Augg*u*c | |
| AV00139 | AV00139-SS | g*u*gguaauGgAcAga | 273 | AV00139-AS | u*A*uaacUcuguCcAu | 357 |
| | | guuau*a | | | Uacc*a*c | |
| AV00140 | AV00140-SS | g*g*guaaugGaCaGag | 274 | AV00140-AS | u*G*auaaCucugUcCa | 358 |
| | | uuauc*a | | | Uuac*c*c | |
| AV00141 | AV00141-SS | c*u*aauggaCaGaGuu | 275 | AV00141-AS | u*U*cgauAacucUgUc | 359 |
| | | aucga*a | | | Cauu*a*g | |
| AV00142 | AV00142-SS | g*a*gaguuaUcGaGgc | 276 | AV00142-AS | u*U*auguGccucGaUa | 360 |
| | | acaua*a | | | Acuc*u*c | |
| AV00143 | AV00143-SS | c*a*guuaucGaGgCac | 277 | AV00143-AS | u*A*guauGugccUcGa | 361 |
| | | auacu*a | | | Uaac*u*g | |
| AV00144 | AV00144-SS | g*a*ccacggUaAuGga | 278 | AV00144-AS | u*C*ucugUccauUaCc | 362 |
| | | cagag*a | | | Gugg*u*c | |
| AV00145 | AV00145-SS | g*a*cugcagGaAuCca | 279 | AV00145-AS | u*G*gaucUggauUcCu | 363 |
| | | gaucc*a | | | Gcag*u*c | |
| AV00146 | AV00146-SS | g*g*gcagccCcUuAuu | 280 | AV00146-AS | u*A*uaacAauaaGgGg | 364 |
| | | guuau*a | | | Cugc*c*c | |
| AV00147 | AV00147-SS | g*a*gccccuUaUuGuu | 281 | AV00147-AS | u*C*guauAacaaUaAg | 365 |
| | | auacg*a | | | Gggc*u*c | |
| AV00148 | AV00148-SS | g*c*agugucAgGuGgg | 282 | AV00148-AS | u*G*uacuCccacCuGa | 366 |
| | | aguac*a | | | Cacu*g*c | |
| AV00149 | AV00149-SS | c*u*acugcaAcCuGac | 283 | AV00149-AS | u*A*uuguGucagGuUg | 367 |
| | | acaau*a | | | Cagu*a*g | |
| AV00150 | AV00150-SS | g*g*acacaaUgCuCag | 284 | AV00150-AS | u*U*gcguCugagCaUu | 368 |
| | | acgca*a | | | Gugu*c*c | |
| AV00151 | AV00151-SS | g*u*agaggcUcCuUcu | 285 | AV00151-AS | u*U*guucAgaagGaGc | 369 |
| | | gaaca*a | | | Cucu*a*c | |
| AV00152 | AV00152-SS | c*a*ggcuccUuCuGaa | 286 | AV00152-AS | u*G*cuugUucagAaGg | 370 |
| | | caagc*a | | | Agcc*u*g | |
| AV00153 | AV00153-SS | g*a*agcaccAaCuGag | 287 | AV00153-AS | u*C*uuugCucagUuGg | 371 |
| | | caaag*a | | | Ugcu*u*c | |
| AV00154 | AV00154-SS | g*g*gaaaugGaCaGag | 288 | AV00154-AS | u*G*auaaCucugUcCa | 372 |
| | | uuauc*a | | | Uuuc*c*c | |
| AV00155 | AV00155-SS | c*a*aauggaCaGaGuu | 289 | AV00155-AS | u*U*ugauAacucUgUc | 373 |
| | | aucaa*a | | | Cauu*u*g | |
| AV00156 | AV00156-SS | g*g*gacagaGuUaUca | 290 | AV00156-AS | u*U*gccuUgauaAcUc | 374 |
| | | aggca*a | | | Uguc*c*c | |
| AV00157 | AV00157-SS | g*u*caagaaCuAcUgc | 291 | AV00157-AS | u*U*uucgGcaguAgUu | 375 |
| | | cgaaa*a | | | Cuug*a*c | |
| AV00158 | AV00158-SS | g*c*aagaacUaCuGcc | 292 | AV00158-AS | u*A*uuucGgcagUaGu | 376 |
| | | gaaau*a | | | Ucuu*g*c | |
| AV00159 | AV00159-SS | g*a*agaacuAcUgCcg | 293 | AV00159-AS | u*G*auuuCggcaGuAg | 377 |
| | | aaauc*a | | | Uucu*u*c | |
| AV00160 | AV00160-SS | g*a*cugccgAaAuCca | 294 | AV00160-AS | u*G*gaucUggauUuCg | 378 |
| | | gaucc*a | | | Gcag*u*c | |
| AV00161 | AV00161-SS | c*u*acugcaAcCuGac | 295 | AV00161-AS | u*A*ucguGucagGuUg | 379 |
| | | acgau*a | | | Cagu*a*g | |
| AV00162 | AV00162-SS | g*g*acacgaUgCuCag | 296 | AV00162-AS | u*U*gcauCugagCaUc | 380 |
| | | augca*a | | | Gugu*c*c | |
| AV00163 | AV00163-SS | c*g*acugcuAcUaCca | 297 | AV00163-AS | u*C*auaaUgguaGuAg | 381 |
| | | uuaug*a | | | Cagu*c*g | |
| AV00164 | AV00164-SS | c*a*cugcuaCuAcCau | 298 | AV00164-AS | u*C*cauaAugguAgUa | 382 |
| | | uaugg*a | | | Gcag*u*g | |
| AV00165 | AV00165-SS | g*c*ugcuacUaCcAuu | 299 | AV00165-AS | u*U*ccauAauggUaGu | 383 |
| | | augga*a | | | Agca*g*c | |
| AV00166 | AV00166-SS | g*a*cuaccaUuAuGga | 300 | AV00166-AS | u*C*ucugUccauAaUg | 384 |
| | | cagag*a | | | Guag*u*c | |
| AV00167 | AV00167-SS | g*c*uugccaAgCuUgg | 301 | AV00167-AS | u*G*augaCcaagCuUg | 385 |
| | | ucauc*a | | | Gcaa*g*c | |
| AV00168 | AV00168-SS | g*u*ugccaaGcUuGgu | 302 | AV00168-AS | u*A*gaugAccaaGcUu | 386 |
| | | caucu*a | | | Ggca*a*c | |
| AV00169 | AV00169-SS | g*a*uagucgGaCcCca | 303 | AV00169-AS | u*U*uuucUggggUcCg | 387 |
| | | gaaaa*a | | | Acua*u*c | |
| AV00170 | AV00170-SS | g*c*aggaacUaCuGca | 304 | AV00170-AS | u*A*uuccUgcagUaGu | 388 |
| | | ggaau*a | | | Uccu*g*c | |
| AV00171 | AV00171-SS | c*a*auccagAuGcUga | 305 | AV00171-AS | u*G*aaucUcagcAuCu | 389 |
| | | gauuc*a | | | Ggau*u*g | |
| AV00172 | AV00172-SS | c*a*gauucgCcCuUgg | 306 | AV00172-AS | u*U*aacaCcaagGgCg | 390 |
| | | uguua*a | | | Aauc*u*g | |
| AV00173 | AV00173-SS | c*c*ccuuggUgUuAca | 307 | AV00173-AS | u*C*auggUguaaCaCc | 391 |
| | | ccaug*a | | | Aagg*g*g | |
| AV00174 | AV00174-SS | g*u*ggugacAgAaUca | 308 | AV00174-AS | u*A*cacuUgauuCuGu | 392 |
| | | agugu*a | | | Cacc*a*c | |
| AV00175 | AV00175-SS | g*a*ucaaguGuCcUug | 309 | AV00175-AS | u*A*guugCaaggAcAc | 393 |
| | | caacu*a | | | Uuga*u*c | |
| AV00176 | AV00176-SS | c*g*gguccaGgAuUgc | 310 | AV00176-AS | u*U*gguaGcaauCcUg | 394 |
| | | uacca*a | | | Gacc*c*g | |
| AV00177 | AV00177-SS | g*u*gucacaGgAaGga | 311 | AV00177-AS | u*A*caugUccuuCcUg | 395 |
| | | caugu*a | | | Ugac*a*c | |
| AV00178 | AV00178-SS | c*g*aaggacAuGuCag | 312 | AV00178-AS | u*C*aagaCugacAuGu | 396 |
| | | ucuug*a | | | Ccuu*c*g | |
| AV00179 | AV00179-SS | c*a*aggacaUgUcAgu | 313 | AV00179-AS | u*C*caagAcugaCaUg | 397 |
| | | cuugg*a | | | Uccu*u*g | |
| AV00180 | AV00180-SS | c*u*cagucuUgGuCcu | 314 | AV00180-AS | u*C*auagAggacCaAg | 398 |
| | | cuaug*a | | | Acug*a*g | |
| AV00181 | AV00181-SS | c*u*ccuuggUgUuAua | 315 | AV00181-AS | u*C*auggUauaaCaCc | 399 |
| | | ccaug*a | | | Aagg*a*g | |
| AV00182 | AV00182-SS | g*u*gguguuAuAcCau | 316 | AV00182-AS | u*G*auccAugguAuAa | 400 |
| | | ggauc*a | | | Cacc*a*c | |
| AV00183 | AV00183-SS | g*g*guguuaUaCcAug | 317 | AV00183-AS | u*G*gaucCauggUaUa | 401 |
| | | gaucc*a | | | Acac*c*c | |
| AV00184 | AV00184-SS | c*u*uauaccAuGgAuc | 318 | AV00184-AS | u*A*uuggGauccAuGg | 402 |
| | | ccaau*a | | | Uaua*a*g | |
| AV00185 | AV00185-SS | g*a*uaccauGgAuCcc | 319 | AV00185-AS | u*A*cauuGggauCcAu | 403 |
| | | aaugu*a | | | Ggua*u*c | |
| AV00186 | AV00186-SS | g*c*cugacaCaAuGuc | 320 | AV00186-AS | u*C*acugGacauUgUg | 404 |
| | | cagug*a | | | Ucag*g*c | |
| AV00187 | AV00187-SS | g*g*acacaaUgUcCag | 321 | AV00187-AS | u*U*gucaCuggaCaUu | 405 |
| | | ugaca*a | | | Gugu*c*c | |
| AV00188 | AV00188-SS | g*a*auguccAgUgAca | 322 | AV00188-AS | u*G*auucUgucaCuGg | 406 |
| | | gaauc*a | | | Acau*u*c | |
| AV00189 | AV00189-SS | g*a*uguccaGuGaCag | 323 | AV00189-AS | u*U*gauuCugucAcUg | 407 |
| | | aauca*a | | | Gaca*u*c | |
| AV00190 | AV00190-SS | g*u*guccagUgAcAga | 324 | AV00190-AS | u*U*ugauUcuguCaCu | 408 |
| | | aucaa*a | | | Ggac*a*c | |
| AV00191 | AV00191-SS | g*g*uccaguGaCaGaa | 325 | AV00191-AS | u*C*uugaUucugUcAc | 409 |
| | | ucaag*a | | | Ugga*c*c | |
| AV00192 | AV00192-SS | g*c*agugacAgAaUca | 326 | AV00192-AS | u*A*cacuUgauuCuGu | 410 |
| | | agugu*a | | | Cacu*g*c | |
| AV00193 | AV00193-SS | g*a*uucuccAcCaCug | 327 | AV00193-AS | u*U*guaaCagugGuGg | 411 |
| | | uuaca*a | | | Agaa*u*c | |
| AV00194 | AV00194-SS | g*c*caccacUgUuAca | 328 | AV00194-AS | u*C*uuccUguaaCaGu | 412 |
| | | ggaag*a | | | Ggug*g*c | |
| AV00195 | AV00195-SS | g*a*cagaauAcUaCcc | 329 | AV00195-AS | u*C*auuuGgguaGuAu | 413 |
| | | aaaug*a | | | Ucug*u*c | |
| AV00196 | AV00196-SS | g*c*agaauaCuAcCca | 330 | AV00196-AS | u*C*cauuUggguAgUa | 414 |
| | | aaugg*a | | | Uucu*g*c | |
| AV00197 | AV00197-SS | g*g*auucgcCcUuGgu | 331 | AV00197-AS | u*A*uaacAccaaGgGc | 415 |
| | | guuau*a | | | Gaau*c*c | |
| AV00198 | AV00198-SS | c*a*uucgccCuUgGug | 332 | AV00198-AS | u*U*auaaCaccaAgGg | 416 |
| | | uuaua*a | | | Cgaa*u*g | |
| AV00199 | AV00199-SS | g*u*cgcccuUgGuGuu | 333 | AV00199-AS | u*G*guauAacacCaAg | 417 |
| | | auacc*a | | | Ggcg*a*c | |
| AV00200 | AV00200-SS | c*c*ccuuggUgUuAua | 334 | AV00200-AS | u*C*auggUauaaCaCc | 418 |
| | | ccaug*a | | | Aagg*g*g | |
| AV00201 | AV00201-SS | g*g*auguccAgUgAca | 335 | AV00201-AS | u*G*auucUgucaCuGg | 419 |
| | | gaauc*a | | | Acau*c*c | |
| AV00202 | AV00202-SS | g*c*agaggcUcCuUcu | 336 | AV00202-AS | u*U*guucAgaagGaGc | 420 |
| | | gaaca*a | | | Cucu*g*c | |
| AV00203 | AV00203-SS | g*a*ucuuggUcAuCua | 337 | AV00203-AS | u*U*aucaUagauGaCc | 421 |
| | | ugaua*a | | | Aaga*u*c | |
| AV00204 | AV00204-SS | g*g*acacaaUgCuCag | 338 | AV00204-AS | u*U*guuuCugagCaUu | 422 |
| | | aaaca*a | | | Gugu*c*c | |
| AV00205 | AV00205-SS | c*c*agugcuAcCaUgg | 339 | AV00205-AS | u*C*auuaCcaugGuAg | 423 |
| | | uaaug*a | | | Cacu*g*g | |
| AV01867 | AV01867-SS | g*a*gaguuaUcGaGgc | 702 | AV01867-AS | u*U*auguGccucGaUa | 795 |
| | | acaua*a | | | Acuc*u*c | |
| AV01868 | AV01868-SS | g*a*gaguuaUcGaGgc | 703 | AV01868-AS | a*U*auguGccucGaUa | 796 |
| | | acaua*u | | | Acuc*u*c | |
| AV01869 | AV01869-SS | g*a*gaguuaUcGaGgc | 704 | AV01869-AS | g*U*auguGccucGaUa | 797 |
| | | acaua*c | | | Acuc*u*c | |
| AV01870 | AV01870-SS | g*a*gaguuaUcGaGgc | 705 | AV01870-AS | c*U*auguGccucGaUa | 798 |
| | | acaua*g | | | Acuc*u*c | |
| AV01871 | AV01871-SS | g*u*uaUcGaGgcacau | 706 | AV01871-AS | u*U*auguGccucGaUa | 799 |
| | | a*a | | | *A*c | |
| AV01872 | AV01872-SS | a*g*uuaUcGaGgcaca | 707 | AV01872-AS | u*U*auguGccucGaUa | 800 |
| | | ua*a | | | A*c*u | |
| AV01873 | AV01873-SS | a*a*guuaUcGaGgcac | 708 | AV01873-AS | u*U*auguGccucGaUa | 801 |
| | | aua*a | | | Ac*u*u | |
| AV01874 | AV01874-SS | u*a*guuaUcGaGgcac | 709 | AV01874-AS | u*U*auguGccucGaUa | 802 |
| | | aua*a | | | Ac*u*a | |
| AV01875 | AV01875-SS | g*a*guuaUcGaGgcac | 710 | AV01875-AS | u*U*auguGccucGaUa | 803 |
| | | aua*a | | | Ac*u*c | |
| AV01876 | AV01876-SS | c*a*guuaUcGaGgcac | 711 | AV01876-AS | u*U*auguGccucGaUa | 804 |
| | | aua*a | | | Ac*u*g | |
| AV01877 | AV01877-SS | a*g*aguuaUcGaGgca | 712 | AV01877-AS | u*U*auguGccucGaUa | 805 |
| | | caua*a | | | Acu*c*u | |
| AV01878 | AV01878-SS | u*g*aguuaUcGaGgca | 713 | AV01878-AS | u*U*auguGccucGaUa | 806 |
| | | caua*a | | | Acu*c*a | |
| AV01879 | AV01879-SS | g*g*aguuaUcGaGgca | 714 | AV01879-AS | u*U*auguGccucGaUa | 807 |
| | | caua*a | | | Acu*c*c | |
| AV01880 | AV01880-SS | c*g*aguuaUcGaGgca | 715 | AV01880-AS | u*U*auguGccucGaUa | 808 |
| | | caua*a | | | Acu*c*g | |
| AV01881 | AV01881-SS | u*a*gaguuaUcGaGgc | 716 | AV01881-AS | u*U*auguGccucGaUa | 809 |
| | | acaua*a | | | Acuc*u*a | |
| AV01882 | AV01882-SS | c*a*gaguuaUcGaGgc | 717 | AV01882-AS | u*U*auguGccucGaUa | 810 |
| | | acaua*a | | | Acuc*u*g | |
| AV01883 | AV01883-SS | a*a*gaguuaUcGaGgc | 718 | AV01883-AS | u*U*auguGccucGaUa | 811 |
| | | acaua*a | | | Acuc*u*u | |
| AV01884 | AV01884-SS | a*c*agaguuaUcGaGg | 719 | AV01884-AS | u*U*auguGccucGaUa | 812 |
| | | cacaua*a | | | Acucu*g*u | |
| AV01885 | AV01885-SS | g*a*cagaguuaUcGaG | 720 | AV01885-AS | u*U*auguGccucGaUa | 813 |
| | | gcacaua*a | | | Acucug*u*c | |
| AV01886 | AV01886-SS | g*g*acagaguuaUcGa | 721 | AV01886-AS | u*U*auguGccucGaUa | 814 |
| | | Ggcacaua*a | | | Acucugu*c*c | |
| AV01887 | AV01887-SS | u*g*gacagaguuaUcG | 722 | AV01887-AS | u*U*auguGccucGaUa | 815 |
| | | aGgcacaua*a | | | Acucuguc*c*a | |
| AV01888 | AV01888-SS | a*u*ggacagaguuaUc | 723 | AV01888-AS | u*U*auguGccucGaUa | 816 |
| | | GaGgcacaua*a | | | Acucugucc*a*u | |
| AV01889 | AV01889-SS | a*u*gguaauggacaga | 724 | AV01889-AS | u*U*auguGccucGaUa | 817 |
| | | guuaUcGaGgcacaua* | | | Acucuguccauuacc*a | |
| | | a | | | *u | |
| AV01890 | AV01890-SS | g*a*gaguuaUcGaGgc | 725 | AV01890-AS | u*U*auguGccucGaUa | 818 |
| | | acaua*a | | | Acucuc*u*u | |
| AV01891 | AV01891-SS | g*a*gaguuaUcGaGgc | 726 | AV01891-AS | u*U*auguGccucGaUa | 819 |
| | | acaua*a | | | Acucuc*g*a | |
| AV01892 | AV01892-SS | g*a*gaguuaUcGaGgc | 727 | AV01892-AS | u*U*aug(uUNA)Gccu | 820 |
| | | acaua*a | | | cGaUaAcuc*u*c | |
| AV01893 | AV01893-SS | g*a*gaguuaUcGaGgc | 728 | AV01893-AS | u*U*augu(gUNA)ccu | 821 |
| | | acaua*a | | | cGaUaAcuc*u*c | |
| AV01894 | AV01894-SS | g*a*gaguuaUCGaggc | 729 | AV01894-AS | u*U*augUgccucgaUa | 822 |
| | | acaua*a | | | Acuc*u*c | |
| AV01895 | AV01895-SS | g*a*gaguuaUcGaGgc | 730 | AV01895-AS | u*U*auguGccucGaUa | 823 |
| | | gcaua*a | | | Acuc*u*c | |
| AV01896 | AV01896-SS | g*a*gaguuaUcGaGgc | 731 | AV01896-AS | u*A*auguGccucGaUa | 824 |
| | | acauu*a | | | Acuc*u*c | |
| AV01897 | AV01897-SS | g*a*gaguuaUcGaGgc | 732 | AV01897-AS | u*U*auguGccucGaUa | 825 |
| | | acau*a*a | | | Acuc*u*c | |
| AV01898 | AV01898-SS | g*u*ugccaaGcUuGgu | 733 | AV01898-AS | u*A*gaugAccaaGcUu | 826 |
| | | caucu*a | | | Ggca*a*c | |
| AV01899 | AV01899-SS | g*u*ugccaaGcUuGgu | 734 | AV01899-AS | a*A*gaugAccaaGcUu | 827 |
| | | caucu*u | | | Ggca*a*c | |
| AV01900 | AV01900-SS | g*u*ugccaaGcUuGgu | 735 | AV01900-AS | g*A*gaugAccaaGcUu | 828 |
| | | caucu*c | | | Ggca*a*c | |
| AV01901 | AV01901-SS | g*u*ugccaaGcUuGgu | 736 | AV01901-AS | c*A*gaugAccaaGcUu | 829 |
| | | caucu*g | | | Ggca*a*c | |
| AV01902 | AV01902-SS | c*c*aaGcUuGgucauc | 737 | AV01902-AS | u*A*gaugAccaaGcUu | 830 |
| | | u*a | | | *G*g | |
| AV01903 | AV01903-SS | g*c*caaGcUuGgucau | 738 | AV01903-AS | u*A*gaugAccaaGcUu | 831 |
| | | cu*a | | | G*g*c | |
| AV01904 | AV01904-SS | a*g*ccaaGcUuGguca | 739 | AV01904-AS | u*A*gaugAccaaGcUu | 832 |
| | | ucu*a | | | Gg*c*u | |
| AV01905 | AV01905-SS | u*g*ccaaGcUuGguca | 740 | AV01905-AS | u*A*gaugAccaaGcUu | 833 |
| | | ucu*a | | | Gg*c*a | |
| AV01906 | AV01906-SS | g*g*ccaaGcUuGguca | 741 | AV01906-AS | u*A*gaugAccaaGcUu | 834 |
| | | ucu*a | | | Gg*c*c | |
| AV01907 | AV01907-SS | c*g*ccaaGcUuGguca | 742 | AV01907-AS | u*A*gaugAccaaGcUu | 835 |
| | | ucu*a | | | Gg*c*g | |
| AV01908 | AV01908-SS | a*u*gccaaGcUuGguc | 743 | AV01908-AS | u*A*gaugAccaaGcUu | 836 |
| | | aucu*a | | | Ggc*a*u | |
| AV01909 | AV01909-SS | u*u*gccaaGcUuGguc | 744 | AV01909-AS | u*A*gaugAccaaGcUu | 837 |
| | | aucu*a | | | Ggc*a*a | |
| AV01910 | AV01910-SS | g*u*gccaaGcUuGguc | 745 | AV01910-AS | u*A*gaugAccaaGcUu | 838 |
| | | aucu*a | | | Ggc*a*c | |
| AV01911 | AV01911-SS | c*u*gccaaGcUuGguc | 746 | AV01911-AS | u*A*gaugAccaaGcUu | 839 |
| | | aucu*a | | | Ggc*a*g | |
| AV01912 | AV01912-SS | u*u*ugccaaGcUuGgu | 747 | AV01912-AS | u*A*gaugAccaaGcUu | 840 |
| | | caucu*a | | | Ggca*a*a | |
| AV01913 | AV01913-SS | c*u*ugccaaGcUuGgu | 748 | AV01913-AS | u*A*gaugAccaaGcUu | 841 |
| | | caucu*a | | | Ggca*a*g | |
| AV01914 | AV01914-SS | a*u*ugccaaGcUuGgu | 749 | AV01914-AS | u*A*gaugAccaaGcUu | 842 |
| | | caucu*a | | | Ggca*a*u | |
| AV01915 | AV01915-SS | a*c*uugccaaGcUuGg | 750 | AV01915-AS | u*A*gaugAccaaGcUu | 843 |
| | | ucaucu*a | | | Ggcaa*g*u | |
| AV01916 | AV01916-SS | a*a*cuugccaaGcUuG | 751 | AV01916-AS | u*A*gaugAccaaGcUu | 844 |
| | | gucaucu*a | | | Ggcaag*u*u | |
| AV01917 | AV01917-SS | g*a*acuugccaaGcUu | 752 | AV01917-AS | u*A*gaugAccaaGcUu | 845 |
| | | Ggucaucu*a | | | Ggcaagu*u*c | |
| AV01918 | AV01918-SS | a*g*aacuugccaaGcU | 753 | AV01918-AS | u*A*gaugAccaaGcUu | 846 |
| | | uGgucaucu*a | | | Ggcaaguu*c*u | |
| AV01919 | AV01919-SS | a*a*gaacuugccaaGc | 754 | AV01919-AS | u*A*gaugAccaaGcUu | 847 |
| | | UuGgucaucu*a | | | Ggcaaguuc*u*u | |
| AV01920 | AV01920-SS | c*a*caggaagaacuug | 755 | AV01920-AS | u*A*gaugAccaaGcUu | 848 |
| | | ccaaGcUuGgucaucu* | | | Ggcaaguucuuccug*u | |
| | | a | | | *g | |
| AV01921 | AV01921-SS | g*u*ugccaaGcUuGgu | 756 | AV01921-AS | u*A*gaugAccaaGcUu | 849 |
| | | caucu*a | | | Ggcaac*u*u | |
| AV01922 | AV01922-SS | g*u*ugccaaGcUuGgu | 757 | AV01922-AS | u*A*gaugAccaaGcUu | 850 |
| | | caucu*a | | | Ggcaac*g*a | |
| AV01923 | AV01923-SS | g*u*ugccaaGcUuGgu | 758 | AV01923-AS | u*A*gau(gUNA)Acca | 851 |
| | | caucu*a | | | aGcUuGgca*a*c | |
| AV01924 | AV01924-SS | g*u*ugccaaGcUuGgu | 759 | AV01924-AS | u*A*gaug(aUNA)cca | 852 |
| | | caucu*a | | | aGcUuGgca*a*c | |
| AV01925 | AV01925-SS | g*u*ugccaaGCUuggu | 760 | AV01925-AS | u*A*gauGaccaagcUu | 853 |
| | | caucu*a | | | Ggca*a*c | |
| AV01926 | AV01926-SS | g*u*ugccaaGcUuGgu | 761 | AV01926-AS | u*A*gaugAccaaGcUu | 854 |
| | | uaucu*a | | | Ggca*a*c | |
| AV01927 | AV01927-SS | g*u*ugccaaGcUuGgu | 762 | AV01927-AS | u*G*gaugAccaaGcUu | 855 |
| | | caucc*a | | | Ggca*a*c | |
| AV01928 | AV01928-SS | g*u*ugccaaGcUuGgu | 763 | AV01928-AS | u*A*gaugAccaaGcUu | 856 |
| | | cauc*u*a | | | Ggca*a*c | |
| AV01929 | AV01929-SS | c*a*uggacaGaGuUau | 764 | AV01929-AS | u*C*cucgAuaacUcUg | 857 |
| | | cgagg*a | | | Ucca*u*g | |
| AV01930 | AV01930-SS | c*a*uggacaGaGuUau | 765 | AV01930-AS | a*C*cucgAuaacUcUg | 858 |
| | | cgagg*u | | | Ucca*u*g | |
| AV01931 | AV01931-SS | c*a*uggacaGaGuUau | 766 | AV01931-AS | g*C*cucgAuaacUcUg | 859 |
| | | cgagg*c | | | Ucca*u*g | |
| AV01932 | AV01932-SS | c*a*uggacaGaGuUau | 767 | AV01932-AS | c*C*cucgAuaacUcUg | 860 |
| | | cgagg*g | | | Ucca*u*g | |
| AV01933 | AV01933-SS | g*a*caGaGuUaucgag | 768 | AV01933-AS | u*C*cucgAuaacUcUg | 861 |
| | | g*a | | | *U*c | |
| AV01934 | AV01934-SS | g*g*acaGaGuUaucga | 769 | AV01934-AS | u*C*cucgAuaacUcUg | 862 |
| | | gg*a | | | U*c*c | |
| AV01935 | AV01935-SS | a*g*gacaGaGuUaucg | 770 | AV01935-AS | u*C*cucgAuaacUcUg | 863 |
| | | agg*a | | | Uc*c*u | |
| AV01936 | AV01936-SS | u*g*gacaGaGuUaucg | 771 | AV01936-AS | u*C*cucgAuaacUcUg | 864 |
| | | agg*a | | | Uc*c*a | |
| AV01937 | AV01937-SS | g*g*gacaGaGuUaucg | 772 | AV01937-AS | u*C*cucgAuaacUcUg | 865 |
| | | agg*a | | | Uc*c*c | |
| AV01938 | AV01938-SS | c*g*gacaGaGuUaucg | 773 | AV01938-AS | u*C*cucgAuaacUcUg | 866 |
| | | agg*a | | | Uc*c*g | |
| AV01939 | AV01939-SS | a*u*ggacaGaGuUauc | 774 | AV01939-AS | u*C*cucgAuaacUcUg | 867 |
| | | gagg*a | | | Ucc*a*u | |
| AV01940 | AV01940-SS | u*u*ggacaGaGuUauc | 775 | AV01940-AS | u*C*cucgAuaacUcUg | 868 |
| | | gagg*a | | | Ucc*a*a | |
| AV01941 | AV01941-SS | g*u*ggacaGaGuUauc | 776 | AV01941-AS | u*C*cucgAuaacUcUg | 869 |
| | | gagg*a | | | Ucc*a*c | |
| AV01942 | AV01942-SS | c*u*ggacaGaGuUauc | 777 | AV01942-AS | u*C*cucgAuaacUcUg | 870 |
| | | gagg*a | | | Ucc*a*g | |
| AV01943 | AV01943-SS | u*a*uggacaGaGuUau | 778 | AV01943-AS | u*C*cucgAuaacUcUg | 871 |
| | | cgagg*a | | | Ucca*u*a | |
| AV01944 | AV01944-SS | g*a*uggacaGaGuUau | 779 | AV01944-AS | u*C*cucgAuaacUcUg | 872 |
| | | cgagg*a | | | Ucca*u*c | |
| AV01945 | AV01945-SS | a*a*uggacaGaGuUau | 780 | AV01945-AS | u*C*cucgAuaacUcUg | 873 |
| | | cgagg*a | | | Ucca*u*u | |
| AV01946 | AV01946-SS | u*g*auggacaGaGuUa | 781 | AV01946-AS | u*C*cucgAuaacUcUg | 874 |
| | | ucgagg*a | | | Uccau*c*a | |
| AV01947 | AV01947-SS | g*u*gauggacaGaGuU | 782 | AV01947-AS | u*C*cucgAuaacUcUg | 875 |
| | | aucgagg*a | | | Uccauc*a*c | |
| AV01948 | AV01948-SS | g*g*ugauggacaGaGu | 783 | AV01948-AS | u*C*cucgAuaacUcUg | 876 |
| | | Uaucgagg*a | | | Uccauca*c*c | |
| AV01949 | AV01949-SS | u*g*gugauggacaGaG | 784 | AV01949-AS | u*C*cucgAuaacUcUg | 877 |
| | | uUaucgagg*a | | | Uccaucac*c*a | |
| AV01950 | AV01950-SS | a*u*ggugauggacaGa | 785 | AV01950-AS | u*C*cucgAuaacUcUg | 878 |
| | | GuUaucgagg*a | | | Uccaucacc*a*u | |
| AV01951 | AV01951-SS | g*c*uaccauggugaug | 786 | AV01951-AS | u*C*cucgAuaacUcUg | 879 |
| | | gacaGaGuUaucgagg* | | | Uccaucaccauggua*g | |
| | | a | | | *c | |
| AV01952 | AV01952-SS | c*a*uggacaGaGuUau | 787 | AV01952-AS | u*C*cucgAuaacUcUg | 880 |
| | | cgagg*a | | | Uccaug*u*u | |
| AV01953 | AV01953-SS | c*a*uggacaGaGuUau | 788 | AV01953-AS | u*C*cucgAuaacUcUg | 881 |
| | | cgagg*a | | | Uccaug*g*a | |
| AV01954 | AV01954-SS | c*a*uggacaGaGuUau | 789 | AV01954-AS | u*C*cuc(gUNA)Auaa | 882 |
| | | cgagg*a | | | cUcUgUcca*u*g | |
| AV01955 | AV01955-SS | c*a*uggacaGaGuUau | 790 | AV01955-AS | u*C*cucg(aUNA)uaa | 883 |
| | | cgagg*a | | | cUcUgUcca*u*g | |
| AV01956 | AV01956-SS | c*a*uggacaGAGuuau | 791 | AV01956-AS | u*C*cucGauaacucUg | 884 |
| | | cgagg*a | | | Ucca*u*g | |
| AV01957 | AV01957-SS | c*a*uggacaGaGuUau | 792 | AV01957-AS | u*C*cucgAuaacUcUg | 885 |
| | | ugagg*a | | | Ucca*u*g | |
| AV01958 | AV01958-SS | c*a*uggacaGaGuUau | 793 | AV01958-AS | u*U*cucgAuaacUcUg | 886 |
| | | cgaga*a | | | Ucca*u*g | |
| AV01959 | AV01959-SS | c*a*uggacaGaGuUau | 794 | AV01959-AS | u*C*cucgAuaacUcUg | 887 |
| | | cgag*g*a | | | Ucca*u*g | |

[0043] Table 3 shows antisense and sense strand sequences of certain chemically modified LPA RNAi agents of the present invention. In some embodiments of the method of the present invention, the RNAi agents shown in Table 3 are administered to cells and/or subjects. In some embodiments of the method of the present invention, RNAi agents having the polynucleotide sequences shown in Table 3 are administered to subjects. In some embodiments of the present invention, the RNAi agent administered to the subject comprises the duplex identified in the first column of Table 3 and comprises the sequence modifications and/or delivery compounds shown in the sense and antisense strand sequences in the third and sixth columns of the same row in Table 3, respectively. This sequence is used in some in vivo test studies described elsewhere herein. In some embodiments of the method of the present invention, the sequences shown in Table 3 may be linked (also referred to herein as “conjugated to”) to compounds for delivery, the non-limiting example of which is GalNAc-containing compounds, i.e., having the compound for delivery labelled “GLX-n” on the sense strand of the third column in Table 3. As used herein and shown in Table 3, “GLX-n” is used to denote the linked GalNAc-containing compound, which is any of the compounds GLS-1, GLS-2, GLS-3, GLS-4, GLS-5, GLS-6, GLS-7, GLS-8, GLS-9, GLS-10, GLS-11, GLS-12, GLS-13, GLS-14, GLS-15, GLS-16, GLO-1, GLO-2, GLO-3, GLO-4, GLO-5, GLO-6, GLO-7, GLO-8, GLO-9, GLO-10, GLO-11, GLO-12, GLO-13, GLO-14, GLO-15 and GLO-16. The structure of each of these is provided elsewhere herein. The first column of Table 3 provides the duplex AD # assigned to the duplex of the sense and antisense sequences in the row in the table. For example, the duplex AD00122 is a duplex composed of the sense strand AD00122-SS and the antisense strand AD00122-AS. Each row in Table 3 provides a sense strand and an antisense strand, and discloses the duplex formed by the indicated sense strand and antisense strand. The “sense strand SS #” in the second column of Table 3 is the designated identifier of the sense sequence (including modification) shown in the third column of the same row. The “antisense strand AS #” in the fifth column of Table 3 is the designated identifier of the antisense sequence (including modification) shown in the sixth column. Certain identifiers of linked GalNAc-containing GLO compounds are shown as GLO-0, and it should be understood that another of the GLO-n or GLS-n compounds may be substituted for the compound shown as GLO-0, and the resulting compound is also included in embodiments of the methods and/or compositions of the present invention.

[0044] Table 3 provides antisense and sense strand sequences of chemically modified LPA RNAi agent for in vivo test. All sequences are shown in 5′ to 3′. These sequences are used in some in vivo test studies described elsewhere herein. The delivery molecule used in the in vivo study is denoted as “GLO-0” at the 3′-end of each sense strand. The delivery molecule used in the in vivo study is denoted as “GLS-5” or “GLS-15” at the 5′-end of each sense strand. Chemical modifications are indicated as: capital: 2′-fluoro; lowercase: 2′-OMe; phosphorothioate: *; unlocked nucleic acid: UNA; invab=reverse abasic; imann: when at the end of each strand:

[chemical structure]

or when further coupling to a delivery molecule:

[chemical structure]

| | | | | Anti- | | |
|---|---|---|---|---|---|---|
| | Sense | | SEQ | sense | | SEQ |
| Duplex | chain | | ID | strand | Antisense | ID |
| AD# | SS# | Sense sequence | NO | AS# | sequence | NO |
| AD00149 | AD00149- | c*a*gccccuUaUuGuuauacg* | 424 | AD00149- | u*C*guauAacaaUaAg | 469 |
| | SS | a(GLO-0) | | AS | Gggc*u*g | |
| AD00150 | AD00150- | a*g*uuaucgAgGcUcauucuc* | 425 | AD00150- | u*G*agaaUgagcCuCg | 470 |
| | SS | a(GLO-0) | | AS | Auaa*c*u | |
| AD00151 | AD00151- | u*g*acacaaUgCuCagacgca* | 426 | AD00151- | u*U*gcguCugagCaUu | 471 |
| | SS | a(GLO-0) | | AS | Gugu*c*a | |
| AD00331 | AD00331- | g*a*cccaaaUgCuGgcuugau* | 427 | AD00331- | u*A*ucaaGccagCaUu | 472 |
| | SS | a(GLO-0) | | AS | Uggg*u*c | |
| AD00332 | AD00332- | g*g*guaaugGaCaGaguuauc* | 428 | AD00332- | u*G*auaaCucugUcCa | 473 |
| | SS | a(GLO-0) | | AS | Uuac*c*c | |
| AD00333 | AD00333- | c*u*aauggaCaGaGuuaucga* | 429 | AD00333- | u*U*cgauAacucUgUc | 474 |
| | SS | a(GLO-0) | | AS | Cauu*a*g | |
| AD00334 | AD00334- | c*a*guuaucGaGgCacauacu* | 430 | AD00334- | u*A*guauGugccUcGa | 475 |
| | SS | a(GLO-0) | | AS | Uaac*u*g | |
| AD00335 | AD00335- | c*u*acugcaAcCuGacacaau* | 431 | AD00335- | u*A*uuguGucagGuUg | 476 |
| | SS | a(GLO-0) | | AS | Cagu*a*g | |
| AD00336 | AD00336- | c*g*acugcuAcUaCcauuaug* | 432 | AD00336- | u*C*auaaUgguaGuAg | 477 |
| | SS | a(GLO-0) | | AS | Cagu*c*g | |
| AD00337 | AD00337- | g*u*ugccaaGcUuGgucaucu* | 433 | AD00337- | u*A*gaugAccaaGcUu | 478 |
| | SS | a(GLO-0) | | AS | Ggca*a*c | |
| AD00338 | AD00338- | c*a*gauucgCcCuUgguguua* | 434 | AD00338- | u*U*aacaCcaagGgCg | 479 |
| | SS | a(GLO-0) | | AS | Aauc*u*g | |
| AD00339 | AD00339- | c*g*aaggacAuGuCagucuug* | 435 | AD00339- | u*C*aagaCugacAuGu | 480 |
| | SS | a(GLO-0) | | AS | Ccuu*c*g | |
| AD00340 | AD00340- | c*u*ccuuggUgUuAuaccaug* | 436 | AD00340- | u*C*auggUauaaCaCc | 481 |
| | SS | a(GLO-0) | | AS | Aagg*a*g | |
| AD00341 | AD00341- | c*c*ccuuggUgUuAuaccaug* | 437 | AD00341- | u*C*auggUauaaCaCc | 482 |
| | SS | a(GLO-0) | | AS | Aagg*g*g | |
| AD00342 | AD00342- | g*g*acacaaUgCuCagaaaca* | 438 | AD00342- | u*U*guuuCugagCaUu | 483 |
| | SS | a(GLO-0) | | AS | Gugu*c*c | |
| AD00433 | AD00433- | (GLS-5)*(Invab)*cugaugg | 439 | AD00433- | u*U*cgauAacucUgUc | 484 |
| | SS | aCaGaGuuaucgaa*(Invab) | | AS | Cauc*a*g | |
| AD00434 | AD00434- | (GLS-5)*(Invab)*ggcuccu | 440 | AD00434- | u*U*cguaUaacaAuAa | 485 |
| | SS | uAuUgUuauacgaa*(Invab) | | AS | Ggag*c*c | |
| AD00435 | AD00435- | (GLS-5)*(Invab)*gaagcac | 441 | AD00435- | u*C*uuugCucagUuGg | 486 |
| | SS | cAaCuGagcaaaga*(Invab) | | AS | Ugcu*u*c | |
| AD00436 | AD00436- | (GLS-5)*(Invab)*gggaaau | 442 | AD00436- | u*G*auaaCucugUcCa | 487 |
| | SS | gGaCaGaguuauca*(Invab) | | AS | Uuuc*c*c | |
| AD00437 | AD00437- | (GLS-5)*(Invab)*gcugcua | 443 | AD00437- | u*U*ccauAauggUaGu | 488 |
| | SS | cUaCcAuuauggaa*(Invab) | | AS | Agca*g*c | |
| AD00438 | AD00438- | (GLS-5)*(Invab)*caaucca | 444 | AD00438- | u*G*aaucUcagcAuCu | 489 |
| | SS | gAuGcUgagauuca*(Invab) | | AS | Ggau*u*g | |
| AD00439 | AD00439- | (GLS-5)*(Invab)*gauucuc | 445 | AD00439- | u*U*guaaCagugGuGg | 490 |
| | SS | cAcCaCuguuacaa*(Invab) | | AS | Agaa*u*c | |
| AD00440 | AD00440- | (GLS-5)*(Invab)*gcagaau | 446 | AD00440- | u*C*cauuUggguAgUa | 491 |
| | SS | aCuAcCcaaaugga*(Invab) | | AS | Uucu*g*c | |
| AD00441 | AD00441- | (GLS-5)*(Invab)*ggauucg | 447 | AD00441- | u*A*uaacAccaaGgGc | 492 |
| | SS | cCcUuGguguuaua*(Invab) | | AS | Gaau*c*c | |
| AD00442 | AD00442- | (GLS-5)*(Invab)*cauucgc | 448 | AD00442- | u*U*auaaCaccaAgGg | 493 |
| | SS | cCuUgGuguuauaa*(Invab) | | AS | Cgaa*u*g | |
| AD00474 | AD00474- | (GLS-15)*(Invab)*caugga | 449 | AD00474- | u*C*cuCg(aUNA)uaa | 494 |
| | SS | caGaGuUaucgagga*(Invab) | | AS | cUcUgUcca*u*g | |
| AD00475 | AD00475- | (GLS-15)*(Invab)*gcugcc | 450 | AD00475- | u*A*gaugAccaaGcUu | 495 |
| | SS | aaGcUuGgucaucua*(Invab) | | AS | Ggca*g*c | |
| AD00476 | AD00476- | (GLS-15)*(Invab)*cccaag | 451 | AD00476- | u*C*auagAugacCaAg | 496 |
| | SS | cuUgGuCaucuauga*(Invab) | | AS | Cuug*g*g | |
| AD00477 | AD00477- | (GLS-15)*(Invab)*ggugcu | 452 | AD00477- | u*U*ccauUaccaUgGu | 497 |
| | SS | acCaUgGuaauggaa*(Invab) | | AS | Agca*c*c | |
| AD00478 | AD00478- | (GLS-15)*(Invab)*gaccau | 453 | AD00478- | u*C*ucUg(uUNA)cca | 498 |
| | SS | ggUaAuGgacagaga*(Invab) | | AS | uUaCcAugg*u*c | |
| AD00479 | AD00479- | (GLS-15)*(Invab)*guggua | 454 | AD00479- | u*A*uaacUcuguCcAu | 499 |
| | SS | auGgAcAgaguuaua*(Invab) | | AS | Uacc*a*c | |
| AD00480 | AD00480- | (GLS-15)*(Invab)*gagagu | 455 | AD00480- | u*U*auguGccucGaUa | 500 |
| | SS | uaUcGaGgcacauaa*(Invab) | | AS | Acuc*u*c | |
| AD00481 | AD00481- | (GLS-15)*(Invab)*caaaug | 456 | AD00481- | u*U*ugauAacucUgUc | 501 |
| | SS | gaCaGaGuuaucaaa*(Invab) | | AS | Cauu*u*g | |
| AD00482 | AD00482- | (GLS-15)*(Invab)*gggaca | 457 | AD00482- | u*U*gcCu(uUNA)gau | 502 |
| | SS | gaGuUaUcaaggcaa*(Invab) | | AS | aAcUcUguc*c*c | |
| AD00483 | AD00483- | (GLS-15)*(Invab)*gaucaa | 458 | AD00483- | u*A*guugCaaggAcAc | 503 |
| | SS | guGuCcUugcaacua*(Invab) | | AS | Uuga*u*c | |
| AD00484 | AD00484- | (GLS-15)*(Invab)*cggguc | 459 | AD00484- | u*U*ggUa(gUNA)caa | 504 |
| | SS | caGgAuUgcuaccaa*(Invab) | | AS | uCcUgGacc*c*g | |
| AD00485 | AD00485- | (GLS-15)*(Invab)*guguca | 460 | AD00485- | u*A*caugUccuuCcUg | 505 |
| | SS | caGgAaGgacaugua*(Invab) | | AS | Ugac*a*c | |
| AD00486 | AD00486- | (GLS-15)*(Invab)*gauguc | 461 | AD00486- | u*U*gauuCugucAcUg | 506 |
| | SS | caGuGaCagaaucaa*(Invab) | | AS | Gaca*u*c | |
| AD00487 | AD00487- | (GLS-15)*(Invab)*gcagag | 462 | AD00487- | u*U*guucAgaagGaGc | 507 |
| | SS | gcUcCuUcugaacaa*(Invab) | | AS | Cucu*g*c | |
| AD00474- | AD00474- | (GLS-15)*(Invab)*caugga | 463 | AD00474- | u*C*cucgAuaacUcUg | 508 |
| 1 | 1-SS | caGaGuUaucgagga*(Invab) | | 1-AS | Ucca*u*g | |
| AD00478- | AD00478- | (GLS-15)*(Invab)*gaccau | 464 | AD00478- | u*C*ucugUccauUaCc | 509 |
| 1 | 1-SS | ggUaAuGgacagaga*(Invab) | | 1-AS | Augg*u*c | |
| AD00482- | AD00482- | (GLS-15)*(Invab)*gggaca | 465 | AD00482- | u*U*gccuUgauaAcUc | 510 |
| 1 | 1-SS | gaGuUaUcaaggcaa*(Invab) | | 1-AS | Uguc*c*c | |
| AD00484- | AD00484- | (GLS-15)*(Invab)*cggguc | 466 | AD00484- | u*U*gguaGcaauCcUg | 511 |
| 1 | 1-SS | caGgAuUgcuaccaa*(Invab) | | 1-AS | Gacc*c*g | |
| AD00337- | AD00337- | (GLS-15)*(Invab)*guugcc | 467 | AD00337- | u*A*gaugAccaaGcUu | 512 |
| 1 | 1-SS | aaGcUuGgucaucua*(Invab) | | 1-AS | Ggca*a*c | |
| AD00436- | AD00436- | (GLS-15)*(Invab)*gggaaa | 468 | AD00436- | u*G*auaaCucugUcCa | 513 |
| 1 | 1-SS | ugGaCaGaguuauca*(Invab) | | 1-AS | Uuuc*c*c | |
| AD00474- | AD00474- | (GLS-15)*(Invab)*gaugga | 888 | AD00474- | a*C*cuCg(aUNA)uaa | 892 |
| 2 | 2-SS | caGaGuuAucgagg*u*(Invab) | | 2-AS | cUcUgucCa*u*c | |
| AD00480- | AD00480- | (GLS-15)*(Imann)*gagagu | 889 | AD00480- | u*U*auguGccucGaUa | 893 |
| 8 | 8-SS | uaUcGaGgcacaua*a*(Imann) | | 8-AS | Acuc*u*c | |
| AD00480- | AD00480- | (GLS-15)*(Invab)*gagagu | 890 | AD00480- | u*U*augugccucGaUa | 894 |
| 1 | 1-SS | uaUcGagGcacaua*a*(Invab) | | 1-AS | acuc*u*c | |
| AD00480- | AD00480- | (GLS-15)*(Invab)*gagagu | 891 | AD00480- | u*U*augugccucG*aU | 895 |
| 2 | 2-SS | uaU*cGagG*cacaua*a* | | 2-AS | *aacuc*u*c | |
| | | (Invab) | | | | |

### Mismatch

[0045] It is known to those skilled in the art that mismatches are tolerated for the efficacy of dsRNAs, especially where mismatches are within the terminal region of dsRNAs. Some mismatches are better tolerated, such as mismatches with wobble base pairs G:U and A:C are better tolerated for efficacy (Du et el., A systematic analysis of the silencing effects of an active siRNA at all single-nucleotide mismatched target sites. Nucleic Acids Res. 2005 Mar. 21; 33(5):1671-7. Doi: 10.1093/nar/gki312. Nucleic Acids Res. 2005; 33(11):3698). In some embodiments of the methods and compounds of the present invention, the LPA dsRNA agent may contain one or more mismatches to the LPA target sequence. In some embodiments, the LPA dsRNA agent of the present invention does not comprise a mismatch. In certain embodiments, the LPA dsRNA agent of the present invention comprises no more than 1 mismatch. In some embodiments, the LPA dsRNA agent of the present invention comprises no more than 2 mismatch. In certain embodiments, the LPA dsRNA agent of the present invention comprises no more than 3 mismatch. In some embodiments of the present invention, the antisense strand of the LPA dsRNA agent comprises a mismatch to an LPA target sequence that is not at the center of the complementary region. In some embodiments, the antisense strand of the LPA dsRNA agent comprises 1, 2, 3, 4 or more mismatches located within the last 5, 4, 3, 2 or 1 nucleotide of one or both of the 5′-end or 3′-end of the complementary region. The methods described herein and/or methods known in the art may be used to determine whether LPA dsRNA agents comprising mismatches to LPA target sequences are effective in inhibiting LPA gene expression.

### Complementarity

[0046] As used herein, unless otherwise stated, the term “complementarity/complementary”, when used to describe the correlation of a first nucleotide sequence (e.g., an LPA dsRNA agent sense strand or a target LPA mRNA) with a second nucleotide sequence (e.g., LPA dsRNA agent antisense strand or single-stranded antisense polynucleotide), refers to the ability of an oligonucleotide or polynucleotide comprising the first nucleotide sequence to hybridize with an oligonucleotide or polynucleotide comprising the second nucleotide sequence [to form hydrogen bonds between base pairs under mammalian physiological conditions (or similar conditions in vitro)], and to form a double helix or double helix structure under certain conditions. Other conditions may also be applied, such as physiologically relevant conditions that may be encountered in an organism. The technician will be able to determine the best set of conditions for testing the complementarity of the two sequences based on the final application of the hybridized nucleotides. Complementary sequences include Watson-Crick base pairs or non-Watson-Crick base pairs, and include natural or modified nucleotides or nucleotide mimics, as long as at least to the extent described above for hybridization. Sequence identity or complementarity is independent of modifications.

[0047] For example, a complementary sequence within an LPA dsRNA as described herein comprises base pairing of an oligonucleotide or polynucleotide containing a first nucleotide sequence with an oligonucleotide or polynucleotide containing a second nucleotide sequence on the full length of the one or two nucleotide sequences. Such sequences may herein be referred to as “completely complementary” to each other. It will be appreciated that in embodiments in which two oligonucleotides are designed to form one or more single-stranded overhangs upon hybridization, such overhangs are not herein considered as mismatches determined based on complementarity. For example, the LPA dsRNA agent comprises an oligonucleotide of 19 nucleotides in length and another oligonucleotide of 20 nucleotides in length, wherein the longer oligonucleotide comprises a sequence of 19 nucleotides completely complementary to the shorter oligonucleotide, which may be referred to as “completely complementary” for the purposes herein described. Thus, as used herein, “completely complementary” means that all (100%) bases in the contiguous sequence of the first polynucleotide will hybridize with the same number of bases in the contiguous sequence of the second polynucleotide. The contiguous sequence may comprise all or part of the first or second nucleotide sequence.

[0048] As used herein, the term “substantially complementary” means that in a hybrid pair of nucleobase sequences, at least about 85% (but not all) of the bases in the contiguous sequence of the first polynucleotide hybridize with the same number of bases in the contiguous sequence of the second polynucleotide. If two sequences comprise one or more mismatched base pairs during hybridization, such as at least 1, 2, 3, 4, or 5 mismatched base pairs, the term “substantially complementary” may be used to refer to the first sequence forming a duplex of up to 15, 16, 17, 18, 19, 20, 21, 22, 23, 24, 25, 26, 27, 28, 29, or 30 base pairs (bp) with the second sequence, while retaining the ability to hybridize under conditions most relevant to its final application, e.g., inhibition of LPA gene expression by the RISC pathway. The term “partially complementary” may be used herein to means that in a hybrid pair of nucleobase sequences, at least 75% (but not all) of the bases in the contiguous sequence of the first polynucleotide hybridize with the same number of bases in the contiguous sequence of the second polynucleotide. In some embodiments, “partially complementary” means that at least 76%, 77%, 78%, 79%, 80%, 81%, 82%, 83%, 84%, 85%, 86%, 87%, 88%, 89%, 90%, 91%, 92%, 93%, 94%, 95%, 96%, 97%, 98%, or 99% of the bases in the contiguous sequence of the first polynucleotide will hybridize with the same number of bases in the contiguous sequence of the second polynucleotide.

[0049] The terms “complementary”, “completely complementary”, “substantially complementary” and “partially complementary” when used herein may be used to refer to a base match between a sense strand and an antisense strand of an LPA dsRNA agent, a base match between an antisense strand of an LPA dsRNA agent and a sequence of a target LPA mRNA, or a base match between a single-stranded antisense oligonucleotide and a sequence of a target LPA mRNA. It will be understood that the term “antisense strand of LPA dsRNA agent” may refer to the same sequence as “LPA antisense polynucleotide agent”.

[0050] As used herein, the term “substantially identical” or “substantial identity” used when referring to nucleic acid sequences mean that the nucleic acid sequence comprises a sequence having at least about 85% or more sequence identity compared to the reference sequence, preferably at least 90%, at least 91%, at least 92%, at least 93%, at least 94%, at least 95%, at least 96%, at least 97%, at least 98%, or at least 99% identity. The percentage of sequence identity is determined by comparing the best alignment of the two sequences on the alignment window. Percentages are calculated by determining the number of positions where the same nucleic acid base occurs in both sequences to produce the number of match positions; dividing the number of match positions by the total number of positions in the alignment window, and the result was multiplied by 100 to arrive at the percentage of sequence identity. The inventions disclosed herein comprise substantially identical nucleotide sequences as those disclosed herein (e.g., in Tables 1-5). In some embodiments, the nucleotide sequence is completely identical or has at least about 85%, 86%, 87%, 88%, 89%, 90%, 91%, 92%, 93%, 94%, 95%, 96%, 97%, 98% or 99% identity to the sequence disclosed herein (e.g., in Tables 1-3).

[0051] As used herein, the term “sequence-containing chain” refers to an oligonucleotide containing a nucleotide chain described by a sequence indicated using standard nucleotide nomenclature. As used herein, the term “double-stranded RNA” or “dsRNA” refers to a sequence comprising an RNA molecule or an RNAi molecule complex having a hybrid double-stranded region comprising two anti-parallel and substantially or completely complementary nucleic acid strands, which are referred to as having “sense” and “antisense” directions relative to a target LPA RNA, respectively. The double-stranded region can have any desired length that allows specific degradation of the target LPA RNA via the RISC pathway, but is typically 9 to 30 base pairs in length, e.g. 15-30 base pairs in length. Considering the duplex between 9 and 30 base pairs, the duplex may be any length within this range, for example, 9, 10, 11, 12, 13, 14, 15, 16, 17, 18, 19, 20, 21, 22, 23, 24, 25, 26, 27, 28, 29 or 30 base pairs, and any subrange thereof, including but not limited to 15-30 base pairs, 15-26 base pairs, 15-23 base pairs, 15-22 base pairs, 15-21 base pairs, 15-20 base pairs, 15-19 base pairs, 15-18 base pairs, 15-17 base pairs, 18-30 base pairs, 18-26 base pairs, 18-23 base pairs, 18-22 base pairs, 18-21 base pairs, 18-20 base pairs, 19-30 base pairs, 19-26 base pairs, 19-23 base pairs, 19-22 base pairs, 19-21 base pairs, 19-20 base pairs, 20-30 base pairs, 20-26 base pairs, 20-25 base pairs, 20-24 base pairs, 20-23 base pairs, 20-22 base pairs, 20-21 base pairs, 21-30 base pairs, 21-26 base pairs, 21-25 base pairs, 21-24 base pairs, 21-23 base pairs, or 21-22 base pairs. The length of LPA dsRNA agent produced in cells by processing with Dicer and similar enzymes is generally in the range of 19-22 base pairs. One strand of the double-stranded region of the LPA dsDNA agent contains a sequence substantially complementary to the region of the target LPA RNA. The two strands forming the duplex structure may come from a single RNA molecule with at least one self-complementing region, or may be formed from two or more individual RNA molecules. In cases where the double-stranded region is formed by a single molecule, the molecule may have a duplex structure (referred to herein as a “hairpin loop”) formed by one strand of a single-stranded nucleotide chain at the 3-end and the corresponding other strand at the 5-end. In some embodiments of the present invention, the hairpin configuration comprises at least 1, 2, 3, 4, 5, 6, 7, 8, 9, 10, 11, 12, 13, 14, 15, 16, 17, 18, 19, 20 or more unpaired nucleotides. When the essentially complementary two strands of the LPA dsRNA agent consist of individual RNA molecules, these molecules do not need to be covalently linked, but can be covalently linked. When two strands are covalently linked by means other than a hairpin loop, the linking structure is called a “linker”. The term “siRNA” is also used herein to refer to dsRNA agent as described herein.

[0052] In some embodiments of the present invention, the LPA dsRNA agent may comprise sense and antisense sequences having unpaired nucleotides or nucleotide analogs at one or both ends of the dsRNA agent. Ends without unpaired nucleotides are called “blunt ends” and have no nucleotide overhangs. If both ends of the dsRNA agents are blunt ends, the dsRNA is referred to as “blunt endsed”. In some embodiments of the present invention, the first end of the dsRNA agent is blunt-ended, in some embodiments, the second end of the dsRNA agent is blunt-ended, and in certain embodiments of the present invention, both ends of the LPA dsRNA agent are blunt-ended.

[0053] In some embodiments of the dsRNA agent of the present invention, the dsRNA does not have one or two blunt ends. In this case, there is at least one unpaired nucleotide at the end of one strand of the dsRNA agent. For example, a nucleotide overhang is present when the 3-end of one strand of dsRNA extends beyond the 5-end of another strand, and vice versa. The dsRNA may comprise an overhang of at least 1, 2, 3, 4, 5, 6 or more nucleotides. The nucleotide overhang may comprise or consist of a nucleotide/nucleoside analog, including a deoxynucleotide/nucleoside. It should be understood that in some embodiments, the nucleotide overhang is on the sense strand of the dsRNA agent, on the antisense strand of the dsRNA agent, or at both ends of the dsRNA agent, the nucleotide of the overhang may be present at the 5′-end, 3-end, or both ends of the antisense strand or sense strand of the dsRNA. In some embodiments of the present invention, one or more nucleotides in the overhang are replaced by nucleoside phosphorothioate.

[0054] As used herein, the terms “antisense strand” or “guide strand” refer to a strand of LPA dsRNA agent that contains a region substantially complementary to the LPA target sequence. As used herein, the terms “sense strand” or “passenger strand” refer to a strand of an LPA dsRNA agent that contains a region substantially complementary to the region of the antisense strand of the LPA dsRNA agent.

### Modification

[0055] In some embodiments of the present invention, the RNA of the LPA RNAi agent is chemically modified to obtain enhanced stability and/or one or more other beneficial properties. Nucleic acids in certain embodiments of the present invention may be synthesized and/or modified by methods well known in the art, see, for example, “Current protocols in Nucleic Acid Chemistry,” Beaucage, S. L. et al. (Eds.), John Wiley & Sons, Inc., New York, N.Y., USA, which is incorporated herein by reference. Modifications that may be present in certain embodiments of the LPA dsRNA agent of the present invention include, such as: (a) a terminal modification, such as a 5′-end modification (phosphorylation, conjugation, reverse linkage, etc.), a 3-end modification (conjugation, DNA nucleotides, reverse linkage, etc.); (b) a base modification, such as, for a base pair, a base substitution with a stabilized base, a destabilized base, or an expanded pool of partners, a base deletion (an abasic nucleotide), or a base conjugation; (c) a sugar modification (e.g., at the 2′ or 4′ position) or a sugar substitution; and (d) a backbone modification, including a modification or a substitution of phosphodiester bond. Specific examples of RNA compounds available in certain embodiments of LPA dsRNA agent, LPA antisense polynucleotides, and LPA sense polynucleotides of the present invention include, but are not limited to, RNAs containing a modified backbone or without natural internucleoside linkage. As a non-limiting example, RNA with backbone modification may have no phosphorus atoms in the backbone. RNAs that have no phosphorus atoms in their internucleoside backbone can be called oligonucleosides. In some embodiments of the present invention, the modified RNA has phosphorus atoms in its internucleoside backbone.

[0056] It should be understood that the terms “RNA molecule” or “RNA” or “ribonucleic acid molecule” include not only RNA molecules expressed or found in nature, but also analogues and derivatives of RNA comprising one or more ribonucleotide/ribonucleoside analogues or derivatives as described herein or known in the art. The terms “ribonucleoside” and “ribonucleotide” are used interchangeably herein. RNA molecules can be modified in nucleobase structures or ribose-phosphate backbone structures (e.g., as described below), and molecules containing ribonucleoside analogs or derivatives must retain the ability to form duplex. As a non-limiting example, an RNA molecule may also comprise at least one modified ribonucleoside, including but not limited to a 2′-O-methyl-modified nucleoside, a nucleoside comprising a 5′ phosphorothioate group, a terminal nucleoside linked to a cholesterol derivative or a dodecanoic acid bisdecylamide group, a locked nucleoside, an abasic nucleoside, a 2′-deoxy-2′-fluoro modified nucleoside, a 2′-amino modified nucleoside, a 2′-alkyl modified nucleoside, a morpholino nucleoside, an phosphoramidate, or a non-natural base comprising nucleoside, or any combination thereof. In some embodiments of the present invention, the RNA molecule comprises the following number of modified ribonucleosides: at least 1, 2, 3, 4, 5, 6, 7, 8, 9, 10, 11, 12, 13, 14, 15, 16, 17, 18, 19, 20 or up to the full length of the ribonucleosides of the LPA dsRNA agent molecule. For each of the multiple modified ribonucleosides in such RNA molecules, the modifications do not have to be the same.

[0057] In some embodiments, the dsRNA agent, LPA antisense polynucleotides and/or LPA sense polynucleotides of the present invention may comprise one or more independently selected modified nucleotides and/or one or more independently selected non-phosphodiester bonds. The term “independently selected” as used herein is used to mean selected elements, such as modified nucleotides, non-phosphodiester bonds, etc., to mean that two or more selected elements may be identical to each other but do not have to be identical to each other. As used herein, “nucleotide base”, “nucleotide” or “nucleobase” are heterocyclic pyrimidine or purine compounds, which are standard components of all nucleic acids, and include nucleotide-forming bases: adenine (a), guanine (g), cytosine (c), thymine (t) and uracil (u). The nucleobases may be further modified to include, but are not intended to limit, universal bases, hydrophobic bases, ambiguous bases, size-enlarged bases, and fluorinated bases. The term “ribonucleotide” or “nucleotide” may be used herein to refer to an unmodified nucleotide, a modified nucleotide, or an alternative moiety. Those skilled in the art will recognize that guanine, cytosine, adenine and uracil can be replaced by other moieties without significantly altering the base pairing properties of oligonucleotides containing nucleotides bearing such replacement moieties.

[0058] In one embodiment, the modified RNA expected to be used in the methods and compositions described herein is a peptide nucleic acid (PNA) having the ability to form a desired duplex structure and to allow or mediate specific degradation of the target RNA via the RISC pathway. In some embodiments of the present invention, LPA RNA interference agents comprise single-stranded RNA that interacts with a target LPA RNA sequence to direct cleavage of the target LPA RNA.

[0059] Modified RNA backbones may comprise, such as, phosphorothioates, chiral phosphorothioates, phosphorodithioates, phosphotriesters, aminoalkylphosphotriesters, methyl and other alkyl phosphonates (including 3′-alkylene phosphonates and chiral phosphonates), phosphinate, phosphoramidates (including 3′-amino phosphoramidates and aminoalkylphosphoramidates), thionophosphoramidates, thionoalkylphosphonates, thionoalkylphosphotriesters, and boranophosphates (which have normal 3′-5′ linkages, and 2′-5′ linked analogues of these, and those with inverted polarity, wherein adjacent nucleoside unit pairs are linked in the form of 3′-5′ to 5′-3′ or 2′-5′ to 5′-2′). Various salts, mixed salts, and free acid forms are also included. Methods for preparing phosphorus-containing bonds are conventional means in the art, and such methods may be used to prepare certain modified LPA dsRNA agent, certain modified LPA antisense polynucleotides, and/or certain modified LPA sense polynucleotides of the present invention.

[0060] The modified RNA backbone in which no phosphorus atoms are included has a backbone formed by short-chain alkyl or cycloalkyl internucleoside linkage, mixed heteroatom and alkyl or cycloalkyl internucleoside linkage, or one or more short-chain heteroatom or heterocycle internucleoside linkage, which comprises those having morpholine bonds (formed partly from the sugar moiety of the nucleoside); siloxane backbones; sulfide, sulfoxide and sulfone backbones; formacetyl and thioformacetyl backbones; methylene formacetyl and thioformacetyl backbones; alkene containing backbones; sulfamate backbones; methyleneimino and methylenehydrazino backbones; sulfonate and sulfonamide backbones; amide backbones; and other moieties mixed with N, O, S, and CH₂ components. Methods for preparing modified RNA backbones that do not contain phosphorus atoms are conventional practice in the art, and such methods may be used to prepare certain modified LPA dsRNA agent, certain modified LPA antisense polynucleotides, and/or certain modified LPA sense polynucleotides of the present invention.

[0061] In certain embodiments of the present invention, an RNA mimic is included in LPA dsRNA, LPA antisense polynucleotides, and/or LPA sense polynucleotides, for example but unlimited, sugars and internucleoside linkages (i.e., backbones) of nucleotide units are replaced with new groups. In such embodiments, base units are maintained to hybridize with suitable LPA nucleic acid target compounds. One such oligomeric compound, an RNA mimic that has been shown to have excellent hybridization properties, is called a peptide nucleic acid (PNA). In PNA compounds, the sugar backbone of RNA is replaced by an amide-containing backbone, especially an aminoethylglycine backbone. The nucleobases are retained and bind directly or indirectly to the aza nitrogen atoms of the amide moiety of the backbone. Methods for preparing RNA mimics are conventionally practiced in the art, and such methods may be used to prepare certain modified LPA dsRNA agent of the present invention.

[0062] Some embodiments of the present invention include RNA having a phosphorothioate backbone and oligonucleosides having a heteroatom backbone, in particular-CH₂—NH—CH₂—, —CH₂—N(CH₃)—O—CH₂— [called methylene (methylimino) or MMI backbone], —CH₂—O—N(CH₃)—CH₂—, —CH₂—N(CH₃)—N(CH₃)—CH₂— and —N(CH₃)—CH₂— [where the natural phosphodiester backbone is denoted as —O—P—O—CH₂—]. Methods for preparing RNA having a phosphorothioate backbone and oligonucleosides having a heteroatom backbone are conventionally practiced in the art, and such methods may be used to prepare certain modified LPA dsRNA agents, certain LPA antisense polynucleotides and/or certain LPA sense polynucleotides of the present invention.

[0063] The modified RNA may also comprise one or more substituted sugar moieties. The LPA dsRNA, LPA antisense polynucleotide and/or LPA sense polynucleotide of the present invention may comprise one of the following at the 2′ position: OH; F; O-, S-, or N-alkyl; O-, S-, or N-alkenyl; O-, S- or N-alkynyl; or O-alkyl-O-alkyl, wherein the alkyl, alkenyl and alkynyl can be substituted or unsubstituted C₁ to C₁₀ alkyl or C₂ to C₁₀ alkenyl and alkynyl. Exemplary suitable modifications include: O[(CH₂)ₙO]ₘCH₃, O(CH₂)ₙOCH₃, O(CH₂)ₙNH₂, O(CH₂)ₙCH₃, O(CH₂)ₙONH₂ and O(CH₂)ₙON[(CH₂)ₙCH₃)]₂, where n and m are 1 to about 10. In other embodiments, the dsRNA includes one of the following at the 2′ position: C₁ to C₁₀ lower alkyl, substituted lower alkyl, alkaryl, aralkyl, O-alkaryl or O-aralkyl, SH, SCH₃, OCN, Cl, Br, CN, CF₃, OCF₃, SOCH₃, SO₂CH₃, ONO₂, NO₂, N₃, NH₂, heterocycloalkyl, heterocycloalkaryl, aminoalkylamino, polyalkylamino; substituted silyl, a RNA cleavage group, a reporter group, an intercalating agent; a group used to improve the pharmacokinetic properties of the LPA dsRNA agent; or used to improve LPA dsRNA agent, a group for improving pharmacodynamic properties of the LPA dsRNA agent, LPA antisense polynucleotide and/or LPA sense polynucleotide, and other substituents with similar properties. In some embodiments, the modifications comprise 2′-methoxyethoxy (2′-O—CH₂CH₂OCH₃, also known as 2′-O-(2-methoxyethyl) or 2′-MOE) (Martin et al., Helv. Chim. Acta, 1995, 78:486-504), that is, alkoxy-alkoxy. Another exemplary modification is 2′-dimethylaminoethoxyethoxy, i.e. O(CH₂)₂ON(CH₃)₂ group, also referred to as 2′-DMAOE, as described in the examples below; and 2′-dimethylaminoethoxyethoxy (also known in the art as 2′-O-dimethylaminoethoxyethyl or 2′-DMAEOE), i.e. 2′-O—CH₂—O—CH₂—N(CH₂)₂. Methods for preparing those modified RNAs described are conventionally practiced in the art, and such methods may be used to prepare certain modified LPA dsRNA agents of the present invention.

[0064] Other modifications include 2′-methoxy (2′-OCH₃), 2′-aminopropoxy (2′-OCH₂CH₂CH₂NH₂) and 2′-fluoro (2′-F). Similar modifications may also be performed in the LPA dsRNA agents of the present invention, at other positions on the RNA of the LPA antisense polynucleotides, in LPA sense polynucleotides and/or at other positions of the LPA sense polynucleotides, in particular at the 3′ position of sugars on 3′ terminal nucleotides or in 2′-5′ linked LPA dsRNA, LPA antisense polynucleotides or LPA sense polynucleotides, and at the 5′ position of the 5′ terminal nucleotides. LPA dsRNA agents, LPA antisense polynucleotides and/or LPA sense polynucleotides may also have sugar mimics, e.g., in place of the cyclobutyl moieties of pentofuranose. Methods for preparing for example those modified RNAs described are conventionally practiced in the art, and such methods may be used to prepare certain modified LPA dsRNA agents, LPA antisense polynucleotides and/or LPA sense polynucleotides of the present invention.

[0065] In some embodiments, LPA dsRNA agents, LPA antisense polynucleotides, and/or LPA sense polynucleotides may comprise nucleobase (generally referred to simply as “base” in the art) modifications or substitutions. As used herein, “unmodified” or “natural” nucleobases include the purine bases adenine (A) and guanine (G), and the pyrimidine bases thymine (T), cytosine (C) and uracil (U). Modified nucleobases include other synthetic and natural nucleobases, such as 5-methylcytosine (5-me-C), 5-hydroxymethyl cytosine, xanthine, hypoxanthine, 2-aminoadenine, 6-methyl and other alkyl derivatives of adenines and guanines, 2-propyl and other alkyl derivatives of adenines and guanines, 2-thiouracil, 2-thiothymine and 2-thiocytosine, 5-halouracil and cytosine, 5-propynyl uracil and cytosine, 6-azo uracil, cytosine and thymine, 5-uracil (pseudouracil), 4-thiouracil; 8-halo, 8-amino, 8-thiol, 8-thioalkyl, 8-hydroxyl and other 8-substituted adenines and guanines; 5-halo, particularly 5-bromo, 5-trifluoromethyl and other 5-substituted uracils and cytosines; 7-methylguanine and 7-methyladenine, 8-azaguanine and 8-azaadenine, 7-azaguanine and 7-azaadenine, and 3-azaguanine and 3-azaadenine. Additional nucleobases that may be included in certain embodiments of the LPA dsRNA agent of the present invention are known in the art, see for example: Modified Nucleosides in Biochemistry, Biotechnology and Medicine, Herdewijn, P. Ed. Wiley-VCH, 2008; The Concise Encyclopedia Of Polymer Science And Engineering, pages 858-859, Kroschwitz, J. L, Ed. John Wiley & Sons, 1990, English et al., Angewandte Chemie, International Edition, 1991, 30, 613, Sanghvi, Y S., Chapter 15, dsRNA Research and Applications, pages 289-302, Crooke, S. T. and Lebleu, B., Ed., CRC Press, 1993. Methods for preparing dsRNAs, LPA antisense polynucleotides, and/or LPA sense polynucleotides (such as those described herein) comprising nucleobase modifications and/or substitutions are routinely practiced in the art, and such methods may be used to prepare certain modified LPA dsRNA agents, LPA sense polynucleotides, and/or LPA antisense polynucleotides of the present invention.

[0066] Certain embodiments of LPA dsRNA agents, LPA antisense polynucleotides and/or LPA sense polynucleotides of the present invention include RNA modified to include one or more locked nucleic acids (LNAs). Locked nucleic acids are nucleotides having such a modified ribose moiety that contain additional bridges linking 2′ and 4′ carbons. This structure effectively “locks” the ribose in the 3′-internal structure conformation. Addition of locked nucleic acids to LPA dsRNA agents, LPA antisense polynucleotides and/or LPA sense polynucleotides of the present invention can increase stability in serum and reduce off-target effects (Elmen, J. et al., (2005) Nucleic Acids Research 33(1):439-447; Mook, O R. et al., (2007) Mol Canc Ther 6(3):833-843; Grunweller, A. et al., (2003) Nucleic Acids Research 31(12):3185-3193). Methods for preparing dsRNA agents, LPA antisense polynucleotides, and/or LPA sense polynucleotides comprising locked nucleic acids are conventionally performed in the art, and such methods may be used to prepare certain modified LPA dsRNA agents of the present invention. Certain embodiments of LPA dsRNA compounds, sense polynucleotides, and/or antisense polynucleotides of the present invention include at least one modified nucleotide comprising: a 2′-O-methyl nucleotide, a 2′-fluoro nucleotide, a 2′-deoxynucleotide, a 2′,3′-seco nucleotide mimic, a locked nucleotide, a 2′-F-arabinose nucleotide, a 2′-methoxyethyl nucleotide, a 2′-amino modified nucleotide, a 2′-alkyl modified nucleotide, a morpholino nucleotide and a 3′-Ome nucleotide, a nucleotide comprising 5′-phosphorothioate group, or a terminal nucleotide linked to a cholesterol derivative or a dodecanoic acid bisdecylamide group, a 2′-amino modified nucleotide, a phosphoramidate, or a non-natural base comprising nucleotide. In some embodiments, the LPA dsRNA compound comprises an E-vinyl phosphonate nucleotide at the 5′-end of the antisense strand (also referred to herein as a guide strand).

[0067] In certain embodiments of the present invention, at least one modified nucleotide is included in a LPA dsRNA compound, at 3′-end and 5′-end of a sense polynucleotide and/or at 3′-end of an antisense polynucleotide, wherein the at least one modified nucleotide includes an abasic nucleotide, a ribitol, a reverse nucleotide, a reverse abasic nucleotide, a reverse 2′-OMe nucleotide, a reverse 2′-deoxynucleotide. It is known to those skilled in the art that the inclusion of abasic or reverse abasic nucleotides at the ends of oligonucleotides can enhance stability (Czauderna et al. Structural variations and stabilizing modifications of synthetic siRNAs in mammalian cells. Nucleic Acids Res. 2003; 31(11):2705-2716. doi:10.1093/nar/gkg393).

[0068] In some embodiments of the present invention, the LPA dsRNA comprises one or two isomannitol residues at the 3′-end and 5′-end of the sense strand. In certain embodiments, the sense chain independently comprises one isomannitol residue at the 3′-end or 5′-end, respectively. The case comprising an isomannitol residue has the following examples:

[chemical structure]

where each phrase “Olig” independently represents the polynucleotide moiety. Exemplary isomannitol residues (imann) include, but are not limited to, the following:

[chemical structure]

In some embodiments, the isomannitol residue may also be replaced with its stereoisomer, non-limiting example:

[chemical structure]

In some embodiments, the sense strand independently comprises one isomannitol residue (imann) at the 3-end or the 5′-end, respectively, and further comprises a targeting group conjugated at the 5′-end, for example, the targeting group N-acetyl-galactosamine, preferably GLS-15 described above, with the following exemplary structure:

[chemical structure]

where each phrase “Olig” independently represents the polynucleotide moiety.

[0069] In certain embodiments of the present invention, an LPA dsRNA compound and/or an antisense polynucleotide comprises at least one modified nucleotide, wherein the at least one modified nucleotide comprises an unlocked nucleic acid (UNA) nucleotide and/or a glycol nucleic acid nucleotide (GNA). It is known to those skilled in the art that UNA and GNA are thermally labile chemical modifications that can significantly improve the off-target profile of siRNA compounds (Janas, et al., Selection of GalNAc-conjugated siRNAs with limited off-target-driven rat hepatotoxicity. Nat Commun. 2018; 9(1):723. doi:10.1038/s41467-018-02989-4; Laursen et al., Utilization of unlocked nucleic acid (UNA) to enhance siRNA performance in vitro and in vivo. Mol BioSyst. 2010; 6:862-70).

[0070] Another modification may be included in the RNA of LPA dsRNA agents, LPA antisense polynucleotides and/or LPA sense polynucleotides of certain embodiments of the present invention, and includes one or more ligands, moieties or chemically linked conjugates to RNA that enhance one or more characteristics of LPA dsRNA agents, LPA antisense polynucleotides and/or LPA sense polynucleotides, respectively. Non-limiting examples of characteristics that may be enhanced are: activity of LPA dsRNA agents, LPA antisense polynucleotides and/or LPA sense polynucleotides, cellular distribution, delivery of LPA dsRNA agents, pharmacokinetic properties of LPA dsRNA agents, and cellular uptake of LPA dsRNA agents. In some embodiments of the present invention, the LPA dsRNA agent comprises one or more targeting or linking groups, which in some embodiments of the LPA dsRNA agent of the present invention are conjugated to the sense strand. A non-limiting example of the targeting group is a compound comprising N-acetyl-galactosamine (GalNAc). The terms “targeting group”, “targeting agent”, “linking agent”, “targeting compound” and “targeting ligand” are used interchangeably herein. In some embodiments of the present invention, the LPA dsRNA agent comprises a targeting compound conjugated to the 5′-end of the sense strand. In some embodiments of the present invention, the LPA dsRNA agent comprises a targeting compound conjugated to the 3′-end of the sense strand. In some embodiments of the present invention, the LPA dsRNA agent comprises a targeting group containing GalNAc. In some embodiments of the present invention, the LPA dsRNA agent does not comprise a targeting compound conjugated to one or both of the 3′-end and 5′-end of the sense strand. In some embodiments of the present invention, the LPA dsRNA agent does not comprise a GalNAc-containing targeting compound conjugated to one or both of the 5′-end and 3′-end of the sense strand.

[0071] Additionally targeting and linking agents are well known in the art, for example, targeting and linking agents that may be used in certain embodiments of the present invention include, but are not limited to, lipid moieties, such as cholesterol moieties (Letsinger et al., Proc. Natl. Acid. Sci. USA, 1989, 86: 6553-6556), cholic acid (Manoharan et al., Bioorg. Med. Chem. Let., 1994, 4:1053-1060), thioethers, such as beryl-S-tritylthiol (Manoharan et al., Ann. N.Y. Acad. Sci., 1992, 660:306-309; Manoharan et al., Biorg. Med. Chem. Let., 1993, 3:2765-2770), thiocholesterol (Oberhauser et al., Nucl. Acids Res., 1992, 20:533-538), aliphatic chains, such as dodecanediol or undecyl residues (Saison-Behmoaras et al., EMBO J, 1991, 10:1111-1118; Kabanov et al., FEBS Lett., 1990, 259:327-330; Svinarchuk et al., Biochimie, 1993, 75:49-54), phospholipids, such as di-hexadecyl-rac-glycerol or triethyl-ammonium 1,2-di-O-hexadecyl-rac-glycerol-3-phosphonate (Manoharan et al., Tetrahedron Lett., 1995, 36:3651-3654; Shea et al., Nucl. Acids Res., 1990, 18:3777-3783), polyamine or polyethylene glycol chains (Manoharan et al., Nucleosides & Nucleotides, 1995, 14:969-973) or adamantane acetic acid (Manoharan et al., Tetrahedron Lett., 1995, 36:3651-3654), palmitoyl moiety (Mishra et al., Biochim. Biophys. Acta, 1995, 1264:229-237) or octadecylamine or hexamino-carbonyloxycholesterol moiety (Crooke et al., J. Pharmacol. Exp. Ther., 1996, 277:923-937).

[0072] Certain embodiments of compositions comprising LPA dsRNA agents, LPA antisense polynucleotides, and/or LPA sense polynucleotides may comprise ligands that alter the distribution, targeting, and the like properties of LPA dsRNA agents. In some embodiments of compositions comprising LPA dsRNA agents of the present invention, ligands increase affinity for selected targets (such as molecules, cells or cell types, compartments, e.g., cell or organ compartments, tissues, organs or body regions), for example, compared to species in which such ligands are not present. Ligands useful in compositions and/or methods of the present invention may be naturally occurring substances, such as proteins (e.g., human serum albumin (HSA), low density lipoprotein (LDL) or globulins), carbohydrates (e.g., dextran, amylopectin, chitin, chitosan, inulin, cyclodextrin or hyaluronic acid) or lipids. The ligand may also be a recombinant or synthetic molecule, such as a synthetic polymer, such as a synthetic polyamino acid or polyamine. Examples of polyamino acids are polylysine (PLL), poly L-aspartic acid, poly L-glutamic acid, styrene-maleic anhydride copolymer, poly (L-lactide-co-glycolic acid) copolymer, divinyl ether-maleic anhydride copolymer, N-(2-hydroxypropyl) methacrylamide copolymer (HMPA), polyethylene glycol (PEG), polyvinyl alcohol (PVA), polyurethane, poly (2-ethyl acrylic acid), N-isopropylacrylamide polymer, or polyphosphazine. Examples of polyamines include: polyethylenimine, polylysine (PLL), spermine, spermidine, polyamine, pseudopeptide-polyamine, peptidomimetic polyamine, dendrimer polyamine, arginine, amidine, protamine, cationic lipid, cationic porphyrin, quaternary salt of polyamine, or alpha helical peptide.

[0073] The ligands included in the compositions and/or methods of the present invention may comprise targeting groups, non-limiting examples of which are cell or tissue targeting agents, such as lectins, glycoproteins, lipids or proteins, such as antibodies that bind to specific cell types such as kidney cells or hepatocytes. A targeting group may be thyrotropin, melanotropin, lectin, glycoprotein, surfactant protein A, mucin carbohydrate, multivalent lactose, multivalent galactose, N-acetyl-galactosamine, N-acetyl-glucosamine multivalent mannose, multivalent fucose, glycosylated polyamino acid, multivalent galactose, transferrin, bisphosphonate, polyglutamate, polyaspartate, a lipid, cholesterol, a steroid, bile acid, folate, vitamin B12, vitamin A, biotin or an RGD peptide or an RGD peptides mimic.

[0074] Other examples of ligands include dyes, intercalating agents (e.g. acridines), cross linkers (e.g. psoralene, mitomycin C), porphyrins (TPPC4, texaphyrin, Sapphyrin), polycyclic aromatic hydrocarbons (e.g., phenazine, dihydrophenazine), artificial endonucleases (e.g. EDTA), lipophilic molecules, e.g, cholesterol, cholic acid, adamantane acetic acid, 1-pyrene butyric acid, dihydrotestosterone, 1,3-bis-O(hexadecyl)glycerol, geranyloxyhexyl group, hexadecylglycerol, borneol, menthol, 1,3-propanediol, heptadecyl group, palmitic acid, myristic acid, O3-(oleoyl)lithocholic acid, O3-(oleoyl)cholic acid, dimethoxytrityl, or phenoxazine and peptide conjugates (e.g., antennapedia peptide, Tat peptide), alkylating agents, phosphate, amino, mercapto, PEG (e.g., PEG-40K), MPEG, [MPEG]2, polyamino, alkyl, substituted alkyl, radiolabeled markers, enzymes, haptens (e.g. biotin), transport/absorption facilitators (e.g., aspirin, vitamin E, folic acid), synthetic ribonucleases (e.g., imidazole, bisimidazole, histamine, imidazole clusters, acridine-imidazole conjugates, Eu³⁺ complexes of tetraazamacrocycles), dinitrophenyl, HRP, or AP.

[0075] The ligands included in the compositions and/or methods of the present invention may be proteins, such as glycoproteins or peptides, such as molecules having a specific affinity for co-ligands, or antibodies, such as antibodies that bind to specific cell types such as cancer cells, endothelial cells, cardiomyocytes or osteocytes. Ligands useful in embodiments of compositions and/or methods of the present invention may be hormones or hormone receptors. Ligands useful in the embodiments of compositions and/or methods of the present invention may be lipids, lectins, carbohydrates, vitamins, coenzymes, multivalent lactose, multivalent galactose, N-acetyl-galactosamine, N-acetyl-glucosamine multivalent mannose, or multivalent fucose. Ligands useful in embodiments of compositions and/or methods of the present invention may be substances that increase the uptake of LPA dsRNA agent into cells, for example, by destroying the cytoskeleton of the cells (e.g., by destroying microtubules, microfilaments, and/or intermediate filaments of the cells). Non-limiting examples of such agents are taxon, vincristine, vinblastine, cytochalasin, nocodazole, japlakinolide, latrunculin A, phalloidin, swinholide A, indanocine and myoservin.

[0076] In some embodiments, ligands linked to the LPA dsRNA agent of the present invention are used as pharmacokinetic (PK) modulators. Examples of PK modulators that may be used in compositions and methods of the present invention include, but are not limited to, lipophilic agents, bile acids, steroids, phospholipid analogues, peptides, protein binders, PEG, vitamins, cholesterol, fatty acids, cholic acids, lithocholic acids, dialkylglycerides, diacylglycerides, phospholipids, sphingolipids, naproxen, ibuprofen, vitamin E, biotin, aptamers that bind to serum proteins, and the like. It is also known that oligonucleotides comprising many phosphorothioate linkages bind to serum proteins, and therefore, short oligonucleotides comprising a plurality of phosphorothioate linkages in the backbone, such as oligonucleotides of about 5 bases, 10 bases, 15 bases, or 20 bases, can also be used as ligands in compositions and/or methods of the present invention.

LPA dsRNA Agent Composition

[0077] In some embodiments of the present invention, LPA dsRNA agents are in compositions. Compositions of the present invention may comprise one or more LPA dsRNA agents and optionally one or more pharmaceutically acceptable carriers, delivery agents, targeting agents, detectable labels, etc. Non-limiting examples of targeting agents available according to some embodiments of the method of the present invention are agents that direct the LPA dsRNA agents of the present invention to and/or into cells to be treated. The choice of targeting agents will depend on the following factors: the nature of the LPA-related disease or condition, and the type of the target cell. In one non-limiting example, in some embodiments of the present invention, it may be necessary to target LPA dsRNA agent to and/or into hepatocytes. It will be appreciated that in some embodiments of the method of the present invention, the therapeutic agent comprises an LPA dsRNA agent having only a delivery agent, such as a delivery agent comprising N-acetylgalactosamine (GalNAc), without any additional linking elements. For example, in some aspects of the present invention, the LPA dsRNA agent may be linked to a delivery compound comprising GalNAc and included in a composition comprising a pharmaceutically acceptable carrier and administered to a cell or subject without any detectable label or targeting agent or the like linked to the LPA dsRNA agent.

[0078] In the case where the LPA dsRNA agent of the present invention is administered together with and/or linked to one or more delivery agents, targeting agents, labeling agents, etc., one skilled in the art is able to understand and to select and use suitable agents for use in the method of the present invention. Labeling agents may be used in certain methods of the present invention to determine the location of LPA dsRNA agent in cells and tissues, and may be used to determine the location of therapeutic compositions comprising LPA dsRNA agents that have been administered in the methods of the present invention in cells, tissues or organs. Means of attaching and using labeling agents such as enzyme labels, dyes, radioactive labels, etc. are well known in the art. It will be appreciated that in some embodiments of the compositions and methods of the present invention, the labeling reagent is linked to one or both of the sense polynucleotides and the antisense polynucleotides included in the LPA dsRNA agent.

Delivery of LPA dsRNA Agent and LPA Antisense Polynucleotide Agent

[0079] Some embodiments of the method of the present invention include delivering LPA dsRNA agent into cells. As used herein, the term “delivery” refers to promoting or affecting cellular uptake or absorption. Absorption or uptake of the LPA dsRNA agent may occur by an independent diffusion or active cellular process, or by using a delivery agent, a targeting agent, or the like that may be associated with the LPA dsRNA agent of the present invention. Delivery manners suitable for the method of the present invention include, but are not limited to, in vivo delivery, where LPA dsRNA agents are injected into tissue sites or administered systemically. In some embodiments of the present invention, the LPA dsRNA agent is linked to the delivery agent.

[0080] Non-limiting examples of methods that can be used to deliver LPA dsRNA agents to cells, tissues, and/or subjects include LPA dsRNA-GalNAc conjugates, SAMiRNA technology, LNP-based delivery methods, and nake RNA delivery. These and other delivery methods have been successfully used in the art to deliver therapeutic RNAi agents to treat various diseases and conditions, such as, but not limited to, liver diseases, acute intermittent porphyria (AIP), hemophilia, pulmonary fibrosis, and the like. Details of multiple delivery manners can be found in publications such as: Nikam, R. R. & K. R. Gore (2018) Nucleic Acid Ther, 28 (4), 209-224 August 2018; Springer A. D. & S. F. Dowdy (2018) Nucleic Acid Ther. June 1; 28(3): 109-118; Lee, K. et al., (2018) Arch Pharm Res, 41(9), 867-874; and Nair, J. K. et al., (2014) J. Am. Chem. Soc. 136:16958-16961, the contents of which are incorporated herein by reference.

[0081] Some embodiments of the present invention include the use of lipid nanoparticles (LNPs) to deliver the LPA dsRNA agent of the present invention to cells, tissues, and/or subjects. LNPs are commonly used for in vivo delivery of LPA dsRNA agents, including therapeutic LPA dsRNA agents. One advantage of using LNP or other delivery agents is that the stability of the LPA RNA agent is increased when delivered to the subject using LNP or other delivery agents. In some embodiments of the present invention, the LNP comprises a cationic LNP loaded with one or more LPA RNAi molecules of the present invention. LNPs comprising LPA RNAi molecules are administered to the subject, and LNPs and their attached LPA RNAi molecules are taken up by cells through endocytosis. Their presence leads to the release of molecules triggering RNAi, thereby mediating RNAi.

[0082] Another non-limiting example of a delivery agent that may be used in embodiments of the present invention to deliver the LPA dsRNA agent of the present invention to cells, tissues, and/or subjects is an agent comprising GalNAc that is linked to the LPA dsRNA agent of the present invention and delivers the LPA dsRNA agent to the cells, the tissues, and/or the subjects. Examples of certain other delivery agents comprising GalNAc that may be used in certain embodiments of the methods and compositions of the present invention are disclosed in PCT application WO2020191183A1. Non-limiting examples of GalNAc targeting ligands that can be used in compositions and methods of the present invention to deliver LPA dsRNA agent to cells are targeting ligand clusters. Examples of targeting ligand clusters provided herein are GalNAc ligands with phosphodiester bonds (GLO) and GalNAc ligands with phosphorothioate bonds (GLS). The term “GLX-n” may be used herein to indicate that the GalNAC-containing compound linked is any of the following compounds: GLS-1, GLS-2, GLS-3, GLS-4, GLS-5, GLS-6, GLS-7, GLS-8, GLS-9, GLS-10, GLS-11, GLS-12, GLS-13, GLS-14, GLS-15, GLS-16, GLO-1, GLO-2, GLO-3, GLO-4, GLO-5, GLO-6, GLO-7, GLO-8, GLO-9, GLO-10, GLO-11, GLO-12, GLO-13, GLO-14, GLO-15, and GLO-16, each of which has a structure as shown below. In the figure below, the linking position of the GalNAc targeting ligand to the RNAi agent of the present invention is on the far right of each targeting ligand. It will be appreciated that any RNAi and dsRNA molecules of the present invention can be linked to GLS-1, GLS-2, GLS-3, GLS-4, GLS-5, GLS-6, GLS-7, GLS-8, GLS-9, GLS-10, GLS-11, GLS-12, GLS-13, GLS-14, GLS-15, GLS-16, GLO-1, GLO-2, GLO-3, GLO-4, GLO-5, GLO-6, GLO-7, GLO-8, GLO-9, GLO-10, GLO-11, GLO-12, GLO-13, GLO-14, GLO-15, and GLO-16, the following are the structures of GLO-1 to GLO-16 and GLS-1 to GLS-16.

[chemical structure]

[chemical structure]

[chemical structure]

[chemical structure]

[chemical structure]

[chemical structure]

[chemical structure]

[chemical structure]

[chemical structure]

[chemical structure]

[chemical structure]

[chemical structure]

[chemical structure]

[chemical structure]

[chemical structure]

[0083] In some embodiments of the present invention, in vivo delivery may also be by beta-dextran delivery systems, such as those described in U.S. Pat. Nos. 5,032,401 and 5,607,677, and U.S. Publication No. 2005/0281781, the entirety of which is incorporated herein by reference. LPA RNAi agents may also be introduced into cells in vitro using methods known in the art, such as electroporation and lipid transfection. In some embodiments of the method of the present invention, LPA dsRNA is delivered without a targeting agent. These RNAs can be delivered as “naked” RNA molecules. As a non-limiting example, the LPA dsRNA of the present invention can be administered to a subject in a pharmaceutical composition comprising an RNAi agent but not a targeting agent (e.g., a GalNAc targeting compound) to treat an LPA-related disease or condition in the subject, such as a cardiovascular disease, wherein the cardiovascular disease includes Berger's disease, peripheral arterial disease, coronary artery disease, metabolic syndrome, acute coronary syndrome, aortic stenosis, aortic regurgitation, aortic dissection, retinal artery occlusion, cerebrovascular diseases, mesenteric ischemia, superior mesenteric artery occlusion, renal artery stenosis, stable/unstable angina, acute coronary syndrome, heterozygous or homozygous familial hypercholesterolemia, hyperapolipoprotein beta lipoproteinemia, cerebrovascular atherosclerosis, cerebrovascular diseases and venous thrombosis, stroke, atherosclerosis, thrombosis, coronary heart diseases or aortic stenosis and/or any other diseases or pathologies related to elevated levels of Lp(a)-containing particles.

[0084] It will be appreciated that, in addition to certain delivery manners described herein, other RNAi delivery modes may be used in conjunction with embodiments of LPA RNAi agents and therapeutic methods described herein, such as, but not limited to, those described herein and those used in the art.

[0085] The LPA dsRNA agent of the present invention can be administered to the subject in an amount and manner that effectively reduces the level of the LPA polypeptide in the cell and/or the subject. In some embodiments of the method of the present invention, one or more LPA dsRNA agents are administered to cells and/or subjects to treat diseases or conditions associated with LPA expression. In some embodiments, the method of the present invention includes administering one or more LPA dsRNA agents to a subject in need thereof to alleviate diseases or conditions associated with LPA expression in the subject. The LPA dsRNA agent or the LPA antisense polynucleotide agent of the present invention may be administered to reduce LPA expression in one or more of the cells in vitro, ex vivo and in vivo.

[0086] In some embodiments of the present invention, the level of LPA polypeptides in cells is reduced by delivery (e.g., introduction) of LPA dsRNA agents or LPA antisense polynucleotide agents into the cells. Targeting agents and methods may be used to facilitate delivery of LPA dsRNA agents or LPA antisense polynucleotide agents to specific cell types, cell subtypes, organs, spatial regions, and/or subcellular regions within cells within the subject. The LPA dsRNA agent may be administered alone or in combination with one or more additional LPA dsRNA agents in certain methods of the present invention. In some embodiments, 2, 3, 4 or more independently selected LPA dsRNA agents are administered to the subject. In some embodiments of the present invention, LPA dsRNA agents are administered to a subject in combination with one or more additional therapeutic regimens for treating an LPA-related disease or condition to treat the LPA-related disease or condition. Other non-limiting examples of therapeutic regimens are administration of one or more LPA antisense polynucleotides of the present invention, administration of non-LPA dsRNA therapeutic agents, and behavioral modifications. Additional therapeutic regimens may be administered at one or more of the following times: before, simultaneously with, and after administration of the LPA dsRNA agent of the present invention. It will be appreciated that “simultaneously” as used herein means within 5 minutes of zero time, within 10 minutes of zero time, within 30 minutes of zero time, within 45 minutes of zero time, and within 60 minutes of zero time, wherein “zero time” is the time at which the LPA dsRNA agent of the present invention is administered to the subject. Non-limiting examples of non-LPA dsRNA therapeutic agents are additional therapeutic agents such as a HMg Co-A reductase inhibitor (statins), ezetimibe, a PCSK-9 inhibitor, a CTEP inhibitor, an ANGPTL3-targeting therapy, an APOC3-targeting therapy and niacin, or any combination thereof. Non-limiting examples of behavioral modifications are: dietary regimens, counseling and exercise regimens. These and other therapeutic agents and behavioral modifications are known in the art and may be used to treat an LPA disease or condition of a subject, and may also be combined with one or more LPA dsRNA agents of the present invention to be administered to the subject to treat the LPA disease or condition. The LPA dsRNA agent of the present invention administered to a cell or subject to treat an LPA-related disease or condition may act in a synergistic manner with one or more other therapeutic agents or active ingredients, thereby increasing the effectiveness of the one or more therapeutic agents or active ingredients and/or increasing the effectiveness of the LPA dsRNA agent in treating the LPA-related disease or condition.

[0087] Therapeutic method of the present invention includes administration of an LPA dsRNA agent that may be used prior to the onset of an LPA-related disease or condition and/or when an LPA-related disease or condition is present, including in the early, middle, late stages of the disease or condition and at all times before and after any of these stages. The method of the present invention can also treat a subject who has been previously treated with one or more other therapeutic agents and/or therapeutically active ingredients for an LPA-related disease or condition, where the one or more other therapeutic agents and/or therapeutically active ingredients are unsuccessful, minimally successful, and/or no longer successful in treating the LPA-related disease or condition of the subject.

Vector-Encoded dsRNA

[0088] In some embodiments of the present invention, the LPA dsRNA agent may be delivered into cells using a vector. LPA dsRNA agent transcription units may be contained in DNA or RNA vectors. The preparation and use of such transgene-encoding vectors for delivery of sequences into cells and/or subjects is well known in the art. Vectors resulting in transient expression of LPA dsRNA, for example for at least 1, 2, 3, 4, 5, 6, 7, 8, 9, 10 h or more, 1, 2, 3, 4, 5, 6, 7, 8, 9, 10 weeks or more, may be used in the method of the present invention. The length of transient expression can be determined using conventional methods based on factors such as, but not limited to, selected specific vector constructs and target cells and/or tissues. Such transgenes can be introduced as linear constructs, cyclic plasmids or viral vectors, which can be integrated or non-integrated vectors. Transgenes can also be constructed to be inherited as extrachromosomal plasmids (Gassmann, et al., Proc. Natl. Acad. Sci. USA (1995) 92: 1292).

[0089] One or more single strands of the LPA dsRNA agent can be transcribed from a promoter on the expression vector. In cases where two individual strands are to be expressed to produce, for example, dsRNA, two individual expression vectors can be co-introduced into the cell using, for example, transfection or infection. In certain embodiments, each individual strand of the LPA dsRNA agent of the present invention may be transcribed by a promoter contained on the same expression vector. In some embodiments of the present invention, the LPA dsRNA agent is expressed as a reverse repeat polynucleotide linked by a linker polynucleotide sequence such that the LPA dsRNA agent has a stem-loop structure.

[0090] Non-limiting examples of RNA expression vectors are DNA plasmids or viral vectors. Expression vectors useful in embodiments of the present invention may be compatible with eukaryotic cells. Eukaryotic cell expression vectors are conventionally used in the art and are available from many commercial sources. Delivery of the LPA dsRNA expression vector may be systemic, such as by intravenous or intramuscular administration, by administration to target cells removed from the subject and then reintroduction of the target cells into the subject, or by any other means that allows for the introduction of desired target cells.

[0091] Viral vector systems that may be included in embodiments of the methods include, but are not limited to, (a) adenovirus vectors; (b) retrovirus vectors, including but not limited to lentiviral vectors, moloney murine leukemia virus, etc.; (c) adeno-associated virus vectors; (d) herpes simplex virus vectors; (e) SV 40 vectors; (f) polyoma virus vectors; (g) papilloma virus vectors; (h) picomavirus vectors; (i) pox virus vectors such as orthopox virus vectors, such as vaccinia virus vectors or avipox virus vectors, such as canary pox or fowl pox virus vectors; (j) helper-dependent or gutless adenovirus vectors. Constructs for recombinant expression of LPA dsRNA agents may comprise regulatory elements, such as promoters, enhancers, etc., which may be selected to provide constitutive or regulatory/inducible expression. The use of viral vector systems and promoters and enhancers and the like are conventional in the art and may be used in conjunction with the methods and compositions described herein.

[0092] Some embodiments of the present invention include delivering LPA dsRNA agents into cells using viral vectors. Many adenovirus-based delivery systems are conventionally used in the art for delivery to, for example, lungs, liver, central nervous system, endothelial cells and muscles. Non-limiting examples of viral vectors that may be used in the method of the present invention are: AAV vectors, pox viruses such as vaccinia viruses, modified Ankara viruses (MVA), NYVAC, avipox such as avipox viruses or canary pox viruses.

[0093] Certain embodiments of the present invention include methods for delivering LPA dsRNA agents into cells using vectors, and such vectors may be in pharmaceutically acceptable carriers that may, but do not necessarily, comprise a sustained release matrix in which a gene delivery vector is embedded. In some embodiments, the vector for delivering the LPA dsRNA may be produced from recombinant cells, and the pharmaceutical composition of the present invention may comprise one or more cells that produce the LPA dsRNA delivery system.

[0094] Pharmaceutical Composition Comprising LPA dsRNA or ssRNA Agent Certain embodiments of the present invention include the use of a pharmaceutical composition comprising an LPA dsRNA agent or an LPA antisense polynucleotide agent and a pharmaceutically acceptable carrier. The pharmaceutical composition comprising the LPA dsRNA agent or the LPA antisense polynucleotide agent may be used in the method of the present invention to reduce LPA gene expression in cells and may be used in the treatment of LPA-related diseases or conditions. Such a pharmaceutical composition may be formulated based on the delivery manner. Non-limiting examples of formulations for delivery manners are compositions formulated for subcutaneous delivery, compositions formulated for systemic administration by parenteral delivery, compositions formulated for intravenous (IV) delivery, compositions formulated for intrathecal delivery, compositions formulated for direct delivery into the brain, and the like. A pharmaceutical composition of the present invention may be administered using one or more manners to deliver an LPA dsRNA agent or an LPA antisense polynucleotide agent into a cell, and the manners is for example via surface (e.g., by a transdermal patch agent); lung, such as by inhalation or insufflation of powder or aerosol, including through a nebulizer; intra-airway, intranasal, epidermal and transdermal, oral or parenteral. Parenteral administration includes intravenous, intraarterial, subcutaneous, intraperitoneal or intramuscular injection or infusion; subepidermal, e.g. by an implantation device; or intracranial, e.g. through intraparenchymal; intrathecal or intraventricular administration. LPA dsRNA agents or LPA antisense polynucleotide agents can also be delivered directly to target tissues, for example, directly to the liver, directly to the kidney, and the like. Understandably, “delivery of LPA dsRNA agent” or “delivery of LPA antisense polynucleotide agent” into a cell includes, respectively, delivery of LPA dsRNA agent or LPA antisense polynucleotide agent, expression of LPA dsRNA agent directly in a cell and expression of LPA dsRNA agent from a coding vector delivered into a cell, or any suitable manner of making LPA dsRNA or LPA antisense polynucleotide agent appear in a cell. Preparation and use of formulations and means for delivering inhibitory RNA are well known and conventionally used in the art.

[0095] As used herein, the “pharmaceutical composition” comprises a pharmacologically effective amount of the LPA dsRNA agent or LPA antisense polynucleotide agent of the present invention and a pharmaceutically acceptable carrier. The term “pharmaceutically acceptable carrier” refers to a carrier used to administer a therapeutic agent. Such a carrier includes, but are not limited to, brine, buffered brine, glucose, water, glycerin, ethanol, and combinations thereof. The term explicitly excludes cell culture media. For drugs administered orally, pharmaceutically acceptable carriers include, but are not limited to, pharmaceutically acceptable excipients, such as inert diluents, disintegrants, binders, lubricants, sweeteners, flavorings, colorants, and preservatives. Suitable inert diluents comprise sodium carbonate and calcium carbonate, sodium phosphate and calcium phosphate, and lactose, while corn starch and alginate are suitable disintegrants. The binders may comprise starch and gelatin, while the lubricants, if present, are usually magnesium stearate, stearic acid or talc. If desired, the tablet may be coated with a material such as glyceryl monostearate or glyceryl distearate to delay absorption in the gastrointestinal tract. Reagents included in pharmaceutical formulations are further described below. The terms used herein, such as “pharmacologically effective amount”, “therapeutically effective amount” and “effective amount”, refer to the amount at which the LPA dsRNA agent or the LPA antisense polynucleotide agent of the present invention produces the desired pharmacological, therapeutic or prophylactic results. For example, if a given clinical treatment is considered effective when a measurable parameter associated with a disease or disorder is reduced by at least 10%, then the therapeutically effective amount of a drug for treating the disease or condition is the amount required to reduce the parameter by at least 10%. For example, therapeutically effective amounts of LPA dsRNA agent or LPA antisense polynucleotide agent may reduce LPA polypeptide levels by at least 10%. The pharmaceutical composition may comprise such a dsRNAi agent comprising, for example, the duplex shown in Table 1. In some other embodiments, such a dsRNAi agent comprises a variant of the duplex in Table 1.

### Effective Amount

[0096] In some aspects, the method of the present invention comprises contacting cells with an effective amount of LPA dsRNA agent or LPA antisense polynucleotide agent to reduce LPA gene expression in the contacted cells. Some embodiments of the method of the present invention comprises administering an LPA dsRNA agent or an LPA antisense polynucleotide agent to a subject in an amount that effectively reduces LPA gene expression and treats an LPA-related disease or condition of the subject. For the purposes of reducing the expression of LPA and/or for the treatment of LPA-related diseases or conditions, the “effective amount” used is the amount necessary or sufficient to achieve the desired biological effect. For example, the effective amount of an LPA dsRNA agent or an LPA antisense polynucleotide agent for the treatment of an LPA-related disease or condition may: (i) be the amount required to slow or stop the progression of the disease or condition; (ii) reverse, reduce or eliminate one or more symptoms of a disease or condition. In some aspects of the present invention, the effective amount is the amount of an LPA dsRNA agent or an LPA antisense polynucleotide agent that, when administered to a subject requiring treatment of an LPA-related disease or condition, results in a therapeutic response of prevention and/or treatment of the disease or condition. According to some aspects of the present invention, the effective amount is the amount of an LPA dsRNA agent or an LPA antisense polynucleotide agent of the present invention that, when combined with or co-administered with another therapeutic treatment for an LPA-related disease or condition, results in a therapeutic response of prevention and/or treatment of the disease or condition. In some embodiments of the present invention, the biological effect of treating a subject with an LPA dsRNA agent or an LPA antisense polynucleotide agent of the present invention may be the improvement and/or complete elimination of symptoms caused by an LPA-related disease or condition. In some embodiments of the present invention, the biological effect is the complete elimination of an LPA-related disease or condition, as evidenced, for example, by a diagnostic test indicating that the subject does not have an LPA-related disease or condition. Non-limiting examples of detectable physiological symptoms include a reduction in lipid accumulation in the subject's liver after administration of the agent of the present invention. Other ways of assessing the state of an LPA-related disease or condition known in the art may be used to determine the effect of the agents and/or methods of the present invention on an LPA-related disease or condition.

[0097] Effective amounts of an LPA dsRNA agent or an LPA antisense polynucleotide agent that reduce LPA polypeptides to levels for treatment of LPA-related diseases or conditions are generally determined in clinical trials that establish effective doses for test population and control population in blinded studies. In some embodiments, the effective amount is an amount that results in a desired response, such as an amount that reduces the LPA-related disease or condition in cells, tissues, and/or subjects with the disease or condition. Thus, an effective amount of an LPA dsRNA agent or LPA antisense polynucleotide agent for treatment of an LPA-related disease or condition that may be treated by reducing the LPA polypeptide may be an amount that, when administered, reduces the amount of the LPA polypeptide in a subject to less than the amount that would be present in cells, tissues and/or the subject without administration of the LPA dsRNA agent or LPA antisense polynucleotide agent. In some aspects of the present invention, the levels of LPA polypeptide and/or LPA gene expression present in cells, tissues and/or subjects not contacted with to or administered with the LPA dsRNA agent or LPA antisense polynucleotide agent of the present invention are referred to as “control” amounts. In some embodiments of the inventive method, a control amount for a subject is the amount for the subject before treatment; in other words, the level for the subject before administration of the LPA agent may be the control level for the subject and used for comparison to LPA polypeptide and/or LPA gene expression level after the administration of the siRNA to the subject. In the case of treatment for an LPA-related disease or condition, the desired response may be to reduce or eliminate one or more symptoms of the disease or condition in cells, tissues, and/or the subject. The reduction or elimination can be temporary or permanent. It will be appreciated that the state of LPA-related diseases or conditions may be monitored using methods such as determining LPA polypeptides and LPA gene expression, symptom assessment, clinical test, and the like. In some aspects of the present invention, the desired response to treatment of an LPA-related disease or condition is to delay the onset of the disease or condition or even prevent the onset of the disease or condition.

[0098] The effective amount of the compound that reduces the LPA polypeptide can also be determined by evaluating the physiological effect of the administration of the LPA dsRNA agent or the LPA antisense polynucleotide agent on the cell or subject, such as the reduction of LPA-related diseases or conditions after administration. The assay and/or symptom monitoring of the subject may be used to determine the efficacy of the LPA dsRNA agent or LPA antisense polynucleotide agent of the present invention, which may be administered in the pharmaceutical compound of the present invention, and to determine whether there is a response to treatment. One non-limiting example is one or more serum lipid profile tests known in the art. Another non-limiting example is that one or more liver function tests known in the art may be used to determine the state of the LPA-related disease or condition of the subject before and after treating the subject with the LPA dsRNA agent of the present invention. In another non-limiting example, one or more cholesterol accumulation tests in the liver known in the art are used to determine the state of the LPA-related disease in the subject. In this embodiment, the disease includes cholesterol accumulation and the test is used to determine cholesterol levels in the subject before and after treating the subject with the LPA dsRNA agent of the present invention.

[0099] Some embodiments of the present invention include a method of determining the efficacy of a dsRNA agent or an LPA antisense polynucleotide agent of the present invention administered to a subject to treat an LPA-related disease or condition by evaluating and/or monitoring one or more “physiological characteristics” of the LPA-related disease or condition in the subject. Non-limiting examples of physiological characteristics of an LPA-related disease or condition are the serum LPA level of the subject, the serum lipid level of the subject, the low-density lipoprotein level of the subject, the HDL level of the subject, the LDL:HDL ratio of the subject, the triglyceride level of the subject, fat present in the liver of the subject, physical symptoms, etc. Standard methods for determining such physiological characteristics are known in the art and include, but are not limited to, blood tests, imaging studies, physical examinations, and the like.

[0100] It will be appreciated that the amount of an LPA dsRNA agent or an LPA antisense polynucleotide agent administered to the subject may be modified based at least in part on the determination results of the disease and/or condition state and/or the physiological characteristics of the subject. The therapeutic amount may be changed by, for example, increasing or decreasing the amount of an LPA dsRNA agent or an LPA antisense polynucleotide agent by changing the composition in which the LPA dsRNA agent or the LPA antisense polynucleotide agent is administered, by changing the route of administration, by changing the time of administration, or the like. An effective amount of an LPA dsRNA agent or an LPA antisense polynucleotide agent will vary with the particular condition being treated, the age and physical condition of a subject being treated, the severity of the condition, the duration of the treatment, the nature of the co-treatment (if any), the specific route of administration, and other factors within the knowledge and expertise of the health practitioner. For example, the effective amount may depend on the level of the LPA polypeptide and/or the desired level of LPA gene expression that is effective for the treatment of LPA-related diseases or conditions. A skilled person can empirically determine the effective amount of a particular LPA dsRNA agent or LPA antisense polynucleotide agent for use in the method of the present invention without excessive experimentation. In combination with the teachings provided herein, an effective prophylactic or therapeutic regimen may be planned to effectively treat a particular subject by selecting from a plurality of LPA dsRNA agents or LPA antisense polynucleotide agents of the present invention and weighing factors such as efficacy, relative bioavailability, patient weight, severity of adverse side effects, and preferred mode of administration. As used in embodiments of the present invention, the effective amount of the LPA dsRNA agent or the LPA antisense polynucleotide agent of the present invention may be the amount that produces the desired biological effect in cells when in contact with the cells.

[0101] It should be recognized that LPA gene silencing can be performed constitutively or by genome engineering in any cell expressing LPA and determined by any suitable assay. In some embodiments of the present invention, LPA gene expression is reduced by at least 5%, 6%, 7%, 8%, 9%, 10%, 15%, 20%, 25%, 30%, 35%, 40%, 45%, 50%, 55%, 60%, 65%, 70%, 75%, 80%, 85%, 90%, 95%, or 100% by administration of the LPA dsRNA agent of the present invention. In some embodiments of the present invention, LPA gene expression is reduced by 5% to 10%, 5% to 25%, 10% to 50%, 10% to 75%, 25% to 75%, 25% to 100% or 50% to 100% by administration of the LPA dsRNA agent of the present invention.

### Mode of

[0102] The LPA dsRNA agent and LPA antisense polynucleotide agent are delivered in a pharmaceutical composition at a dose sufficient to inhibit LPA gene expression. In certain embodiments of the present invention, a dose of an LPA dsRNA agent or LPA antisense polynucleotide agent is 0.01 to 200.0 mg per kg of body weight of a subject per day, generally 1 to 50 mg/kg body weight, 5 to 40 mg/kg body weight, 10 to 30 mg/kg body weight, 1 to 20 mg/kg body weight, 1 to 10 mg/kg body weight, 4 to 15 mg/kg body weight per day, including endpoint values. For example, the LPA dsRNA agent or LPA antisense polynucleotide agent may be administered at a single dose of about 0.01 mg/kg, 0.05 mg/kg, 0.1 mg/kg, 0.2 mg/kg, 0.3 mg/kg, 0.4 mg/kg, 0.5 mg/kg, 1 mg/kg, 1.1 mg/kg, 1.2 mg/kg, 1.3 mg/kg, 1.4 mg/kg, 1.5 mg/kg, 1.6 mg/kg, 1.7 mg/kg, 1.8 mg/kg, 1.9 mg/kg, 2 mg/kg, 2.1 mg/kg, 2.2 mg/kg, 2.3 mg/kg, 2.4 mg/kg, 2.5 mg/kg, 2.6 mg/kg, 2.7 mg/kg, 2.8 mg/kg, 2.9 mg/kg, 3.0 mg/kg, 3.1 mg/kg, 3.2 mg/kg, 3.3 mg/kg, 3.4 mg/kg, 3.5 mg/kg, 3.6 mg/kg, 3.7 mg/kg, 3.8 mg/kg, 3.9 mg/kg, 4 mg/kg, 4.1 mg/kg, 4.2 mg/kg, 4.3 mg/kg, 4.4 mg/kg, 4.5 mg/kg, 4.6 mg/kg, 4.7 mg/kg, 4.8 mg/kg, 4.9 mg/kg, 5 mg/kg, 5.1 mg/kg, 5.2 mg/kg, 5.3 mg/kg, 5.4 mg/kg, 5.5 mg/kg, 5.6 mg/kg, 5.7 mg/kg, 5.8 mg/kg, 5.9 mg/kg, 6 mg/kg, 6.1 mg/kg, 6.2 mg/kg, 6.3 mg/kg, 6.4 mg/kg, 6.5 mg/kg, 6.6 mg/kg, 6.7 mg/kg, 6.8 mg/kg, 6.9 mg/kg, 7 mg/kg, 7.1 mg/kg, 7.2 mg/kg, 7.3 mg/kg, 7.4 mg/kg, 7.5 mg/kg, 7.6 mg/kg, 7.7 mg/kg, 7.8 mg/kg, 7.9 mg/kg, 8 mg/kg, 8.1 mg/kg, 8.2 mg/kg, 8.3 mg/kg, 8.4 mg/kg, 8.5 mg/kg, 8.6 mg/kg, 8.7 mg/kg, 8.8 mg/kg, 8.9 mg/kg, 9 mg/kg, 9.1 mg/kg, 9.2 mg/kg, 9.3 mg/kg, 9.4 mg/kg, 9.5 mg/kg, 9.6 mg/kg, 9.7 mg/kg, 9.8 mg/kg, 9.9 mg/kg, 10 mg/kg, 11 mg/kg, 12 mg/kg, 13 mg/kg, 14 mg/kg, 15 mg/kg, 16 mg/kg, 17 mg/kg, 18 mg/kg, 19 mg/kg, 20 mg/kg, 21 mg/kg, 22 mg/kg, 23 mg/kg, 24 mg/kg, 25 mg/kg, 26 mg/kg, 27 mg/kg, 28 mg/kg, 29 mg/kg, 30 mg/kg, 31 mg/kg, 32 mg/kg, 33 mg/kg, 34 mg/kg, 35 mg/kg, 36 mg/kg, 37 mg/kg, 38 mg/kg, 39 mg/kg, 40 mg/kg, 41 mg/kg, 42 mg/kg, 43 mg/kg, 44 mg/kg, 45 mg/kg, 46 mg/kg, 47 mg/kg, 48 mg/kg, 49 mg/kg to 50 mg/kg body weight.

[0103] A variety of factors may be considered in determining the delivery dose and time of the LPA dsRNA agent of the present invention. The absolute amount of LPA dsRNA agents or LPA antisense polynucleotide agents delivered will depend on a variety of factors, including co-treatment, number of doses and individual subject parameters, including age, physical condition, physical size and body weight. These factors are well known to those of ordinary skill in the art and can be solved by conventional experiments. In some embodiments, a maximum dose, that is, the highest safe dose based on reasonable medical judgment, may be used.

[0104] In some embodiments, the method of the present invention may comprise administering 1, 2, 3, 4, 5, 6, 7, 8, 9, 10 or more doses of LPA dsRNA agents or LPA antisense polynucleotide agents to the subject. In some cases, a pharmaceutical compound (e.g., comprising an LPA dsRNA agent or comprising an LPA antisense polynucleotide agent) may be administered to a subject at a certain dose at least daily, every other day, weekly, every other week, monthly, etc., and may be administered once a day or more than once a day, e.g. 2, 3, 4, 5, or more times in a 24-hour cycle. The pharmaceutical composition of the present invention may be administered once a day; or an LPA dsRNA agent or an LPA antisense polynucleotide agent may be administered in two, three, or more subdoses at appropriate intervals within a day, or even delivered using continuous infusions or by controlled release formulations. In some embodiments of the method of the present invention, the pharmaceutical composition of the present invention is administered to the subject once or more daily, once or more weekly, once or more monthly, or once or more annually.

[0105] In certain aspects, the method of the present invention comprises administering a pharmaceutical compound alone or in combination with one or more other LPA dsRNA agents or LPA antisense polynucleotide agents, and/or in combination with other drug therapies or therapeutic activities or protocols administered to a subject with an LPA-related disease or condition. The pharmaceutical compound may be administered in the form of a pharmaceutical composition. The pharmaceutical composition used in the method of the present invention may be sterile and comprises an amount of LPA dsRNA agent or LPA antisense polynucleotide agent that reduces the level of the LPA polypeptide to a level sufficient to produce the desired response in a unit of weight or volume suitable for administration to the subject. The dose of the pharmaceutical composition comprising the LPA dsRNA agent or LPA antisense polynucleotide agent to be administered to the subject may be selected according to different parameters to reduce the LPA protein level, in particular according to the mode of administration used and the state of the subject. Other factors include the duration of treatment required. If the response of the subject is insufficient at the initial dose, a higher dose may be used within the tolerance of the patient (or the dose may be effectively increased by a different, more localized delivery route).

### Treatment

[0106] As used herein, the terms “prevent” or “preventing”, when used in reference to a disease, condition, or disorder that would benefit from decreased LPA gene expression, refers to a reduction in the likelihood that a subject will experience a symptom related to such a disease, condition, or disorder, such as a cardiovascular disease, including Berger's disease, peripheral arterial disease, coronary artery disease, metabolic syndrome, acute coronary syndrome, aortic stenosis, aortic regurgitation, aortic dissection, retinal artery occlusion, cerebrovascular diseases, mesenteric ischemia, superior mesenteric artery occlusion, renal artery stenosis, stable/unstable angina, acute coronary syndrome, heterozygous or homozygous familial hypercholesterolemia, hyperapolipoprotein beta lipoproteinemia, cerebrovascular atherosclerosis, cerebrovascular diseases and venous thrombosis, stroke, atherosclerosis, thrombosis, coronary heart diseases or aortic stenosis and/or any other diseases or pathologies related to elevated levels of Lp(a)-containing particles. In such cases, the likelihood of occurring such a disease is reduced, for example, when an individual has one or more cardiovascular disease risk factors, but does not develop a cardiovascular disease or only develops a cardiovascular disease of less severity, it is considered effective prevention if the individual fails to develop a related disease, condition or condition, or has a reduced degree of development of symptoms associated with such a disease, condition or condition (e.g., a reduction of at least about 10% on the scale of the disease or condition clinically), or a delayed presentation of symptoms (e.g., a delay of days, weeks, months or years), relative to a population with the same risk factors and without receiving the treatment described herein.

[0107] For an LPA-related disease and condition in which a reduction in the level of the LPA polypeptide is effective in treating the disease or condition, the method and the LPA dsRNA agent of the present invention may be used for treatment to inhibit LPA expression. Examples of diseases and conditions that can be treated with the LPA dsRNA agent or LPA antisense polynucleotide agent of the present invention and the therapeutic method of the present invention include, but are not limited to: Berger's disease, peripheral arterial disease, coronary artery disease, metabolic syndrome, acute coronary syndrome, aortic stenosis, aortic regurgitation, aortic dissection, retinal artery occlusion, cerebrovascular diseases, mesenteric ischemia, superior mesenteric artery occlusion, renal artery stenosis, stable/unstable angina, acute coronary syndrome, heterozygous or homozygous familial hypercholesterolemia, hyperapolipoprotein beta lipoproteinemia, cerebrovascular atherosclerosis, cerebrovascular diseases and venous thrombosis, stroke, atherosclerosis, thrombosis, coronary heart diseases or aortic stenosis and/or any other diseases or pathologies related to elevated levels of Lp(a)-containing particles. Such a disease and condition may herein be referred to as “LPA-related disease and condition” and “disease and condition caused and/or regulated by LPA”.

[0108] In some aspects of the present invention, the LPA dsRNA agent or the LPA antisense polynucleotide agent of the present invention may be administered to a subject at one or more times before or after diagnosis of an LPA-related disease or condition. In some aspects of the present invention, the subject is at risk of suffering from or developing an LPA-related disease or condition. Subject at risk of developing an LPA-related disease or condition are those with an increased likelihood of developing the LPA-related disease or condition compared to controls at risk of developing the LPA-related disease or condition. In some embodiments of the present invention, the level of the risk is statistically significant compared to the control level of the risk. Subjects at risk may include, for example: those who are or will be subjects with pre-existing diseases and/or genetic abnormalities that make the subjects more susceptible to an LPA-related disease or condition than control subjects without the pre-existing diseases or genetic abnormalities; subjects with a family and/or personal history of an LPA-related disease or condition; and subjects who have previously been treated for an LPA-related disease or condition. It will be appreciated that pre-existing diseases and/or genetic abnormalities that make the subject more susceptible to an LPA-related disease or condition may be diseases or genetic abnormalities that, when present, have previously been determined to be associated with a higher likelihood of developing the LPA-related disease or condition.

[0109] It will be appreciated that the LPA dsRNA agent or LPA antisense polynucleotide agent may be administered to a subject based on the medical condition of the individual subject. For example, the healthcare provided to the subject may evaluate the LPA level measured in the sample obtained from the subject and determine that it is desirable to reduce the LPA level of the subject by administering the LPA dsRNA agent or the LPA antisense polynucleotide agent of the present invention. In one non-limiting example, a biological sample, such as a blood or serum sample, may be obtained from the subject, and the LPA level of the subject may be determined in the sample. An LPA dsRNA agent or LPA antisense polynucleotide agent is administered to a subject, and a blood or serum sample is obtained from the subject after administration, and the LPA level is measured using the sample, and the result is compared to the result determined in the sample of the subject before administration (previous). Compared to the level before administration, the subsequent reduction of LPA level in the sample of the subject indicates the efficacy of the administered LPA dsRNA agent or LPA antisense polynucleotide agent in reducing the LPA level of the subject. In one non-limiting example, the level of Lp (a) in the blood may be considered a physiological characteristic of an LPA-related condition, even if the subject has not been diagnosed with the LPA-related condition, such as that disclosed herein. The healthcare provider may monitor changes in Lp(a) levels in the blood of the subject as a measure of the efficacy of the administered LPA dsRNA agent or LPA antisense polynucleotide agent of the present invention.

[0110] Some embodiments of the method of the present invention include adjusting the treatment, and the treatment comprises administering the dsRNA agent or the LPA antisense polynucleotide agent of the present invention to a subject based at least in part on an evaluation of changes in one or more physiological characteristics of LPA-related diseases or conditions in the subject caused by the treatment. For example, in some embodiments of the present invention, the action of a dsRNA agent or an LPA antisense polynucleotide agent of the present invention administered to a subject may be determined and used to help regulate the amount of the dsRNA agent or LPA antisense polynucleotide agent of the present invention subsequently administered to the subject. In one non-limiting example, a dsRNA agent or an LPA antisense polynucleotide agent of the present invention is administered to a subject, and the Lp (a) level in the blood of the subject is measured after administration; and at least partially based on the determined level, it is determined whether a higher amount of the dsRNA agent or the LPA antisense polynucleotide agent is required to improve the physiological effect of the administered agent, such as reducing or further reducing Lp (a) level in the blood of the subject. In another non-limiting example, the dsRNA agent or LPA antisense polynucleotide agent of the present invention is administered to the subject and the level of Lp (a) in the blood of the subject is determined after administration, and a lower amount of the dsRNA agent or LPA antisense polynucleotide agent is expected to be administered to the subject based at least in part on the determined level.

[0111] Thus, some embodiments of the present invention include evaluating changes in one or more physiological characteristics caused by prior treatment of the subject to adjust the amount of the dsRNA agent or LPA antisense polynucleotide agent of the present invention subsequently administered to the subject. Some embodiments of the method of the present invention include measuring physiological characteristics of an LPA-related disease or condition 1, 2, 3, 4, 5, 6 or more times; evaluating and/or monitoring the efficacy of administered LPA dsRNA agent or LPA antisense polynucleotide agent of the present invention; and optionally adjusting one or more of the followings using the measured results: dosage, dosing regimen, and/or dosing frequency of the dsRNA agent or LPA antisense polynucleotide agent of the present invention for treating the LPA-related disease or condition in a subject. In some embodiments of the method of the present invention, the desired result of administering an effective amount of the dsRNA agent or the LPA antisense polynucleotide agent of the present invention to a subject is that the Lp(a) level in blood of the subject is reduced compared to the previous Lp(a) level in the blood determined for the subject; the Lp(a) level in the blood of the subject was within the normal range.

[0112] As used herein, the terms “treat”, “therapeutic” or “treated” when used for an LPA-related disease or condition may refer to a prophylactic treatment, reducing the likelihood of developing an LPA-related disease or condition in a subject, and may also refer to a treatment to eliminate or reduce the level of an LPA-related disease or condition after the subject has developed the LPA-related disease or condition, preventing an LPA-related disease or condition from becoming more severe, and/or slowing the progression of an LPA-related disease or condition in a subject compared to the subject in the absence of therapy that reduces the level of the LPA polypeptide in the subject.

[0113] Certain embodiments of the agents, compositions, and methods of the present invention may be used to inhibit LPA gene expression. As used herein, with regard to the expression of the LPA gene, the terms “inhibit”, “silence”, “reduce”, “down-regulate” and “knock down” refer to, for example, changing the expression of the LPA gene by one or more of the followings: the level of RNA transcribed by the gene, the level of LPA expressed, and the level of LPA polypeptide, protein or protein subunit translated from the mRNA in a cell, cell population, tissue, organ or subject is reduced when the cell, cell population, tissue, organ or subject is contacted with (e.g., treated with) the LPA dsRNA agent or the LPA antisense polynucleotide agent of the present invention, as compared to the control level of RNA transcribed by the LPA gene, the control level of LPA translated from the mRNA, respectively. In some embodiments, the control level is the level in cells, tissues, organs or subjects not contacting with (e.g. treated with) the LPA dsRNA agents or LPA antisense polynucleotide agents.

### Application Method

[0114] Various routes of administration of the LPA dsRNA agent or LPA antisense polynucleotide agent may be used in the method of the present invention. The choice of a particular delivery mode will depend, at least in part, on the specific condition being treated and the dose required for therapeutic efficacy. In general, the method of the present invention can be implemented using any medically acceptable dosing mode, meaning any mode that produces an effective therapeutic level on LPA-related diseases or conditions without causing clinically unacceptable side effects. In some embodiments of the present invention, the LPA dsRNA agents or LPA antisense polynucleotide agents may be administered orally, enterally, mucosally, subcutaneously, and/or parenterally. The term “parenteral” includes subcutaneous, intravenous, intrathecal, intramuscular, intraperitoneal and intrasternal injection or infusion techniques. Other routes include, but are not limited to, nasal (e.g., through a nasogastric tube), percutaneous, vaginal, rectal, sublingual, and inhalation. The delivery route of the present invention may include intrathecal, intraventricular or intracranial. In some embodiments of the present invention, the LPA dsRNA agent or LPA antisense polynucleotide agent may be placed in a sustained release matrix and administered by placing the matrix in a subject. In some aspects of the present invention, the LPA dsRNA agent or LPA antisense polynucleotide agent may be delivered to cells of the subject using nanoparticles coated with delivery agents targeting specific cells or organelles. Various delivery manners, methods, and agents are known in the art. Non-limiting examples of delivery methods and delivery agents are provided elsewhere herein. In some aspects of the present invention, the term “delivery” with respect to LPA dsRNA agent or LPA antisense polynucleotide agent may refer to the administration of one or more “naked” LPA dsRNA agent or LPA antisense polynucleotide agent sequences to a cell or subject. In certain aspects of the present invention, “delivery” refers to delivery to a cell or subject by transfection, delivery of a cell comprising an LPA dsRNA agent or an LPA antisense polynucleotide agent to a subject, delivery of a vector encoding an LPA dsRNA agent or an LPA antisense polynucleotide agent to a cell and/or subject, etc. Delivery of an LPA dsRNA agent or an LPA antisense polynucleotide agent using a transfection mode may include administering a vector to a cell and/or a subject.

[0115] In some methods of the present invention, one or more LPA dsRNA agents or LPA antisense polynucleotide agents may be administered in formulation form or in pharmaceutically acceptable solutions, which may generally contain pharmaceutically acceptable concentrations of salts, buffers, preservatives, compatible carriers, adjuvants, and optionally other therapeutic ingredients. In some embodiments of the present invention, the LPA dsRNA agent or LPA antisense polynucleotide agent may be formulated with another therapeutic agent for simultaneous administration. According to the method of the present invention, the LPA dsRNA agent or LPA antisense polynucleotide agent may be administered in the form of a pharmaceutical composition. Typically, the pharmaceutical composition comprises the LPA dsRNA agent or LPA antisense polynucleotide agent and optionally a pharmaceutically acceptable carrier. The pharmaceutically acceptable carrier is well known to those of ordinary skill in the art. As used herein, the pharmaceutically acceptable vector refers to a non-toxic material that does not interfere with the effectiveness of the biological activity of the active ingredient (e.g., the ability of LPA dsRNA agent or LPA antisense polynucleotide agent to inhibit LPA gene expression in cells or subjects). Various methods of administering and delivering the dsRNA agent or LPA antisense polynucleotide agent for therapeutic use are known in the art and may be used in the methods of the present invention.

[0116] Pharmaceutically acceptable carriers include diluents, fillers, salts, buffers, stabilizers, solubilizers and other materials known in the art. Exemplary pharmaceutically acceptable carriers are described in U.S. Pat. No. 5,211,657, while other carriers are known to those skilled in the art. Such formulations may generally contain salts, buffers, preservatives, compatible carriers and optionally other therapeutic agents. The salts should be pharmaceutically acceptable for use in medicine, but non-pharmaceutically acceptable salts can be conveniently used to prepare their pharmaceutically acceptable salts and are not excluded from the scope of the present invention. Such pharmacologically and pharmaceutically acceptable salts include, but are not limited to, salts prepared from hydrochloric acid, hydrobromic acid, sulfuric acid, nitric acid, phosphoric acid, maleic acid, acetic acid, salicylic acid, citric acid, formic acid, malonic acid, succinic acid, and the like. Further, pharmaceutically acceptable salts may be prepared as alkali metal salts or alkaline earth metal salts, such as sodium salts, potassium salts or calcium salts.

[0117] Some embodiments of the method of the present invention include administrating one or more LPA dsRNA agents or LPA antisense polynucleotide agents directly to tissues. In some embodiments, the tissue to which the compound is administered is a tissue in which LPA-related diseases or conditions are present or are likely to develop, non-limiting examples of the tissue are the liver or kidney. Direct tissue administration can be achieved by direct injection or by other means. Many orally delivered compounds naturally enter and pass through the liver and kidneys, and some embodiments of the therapeutic method of the present invention include the oral administration of one or more LPA dsRNA agents to the subject. LPA dsRNA agents or LPA antisense polynucleotide agents, alone or in combination with other therapeutic agents, may be administered once, or may be administered multiple times. If administered multiple times, the LPA dsRNA agent or LPA antisense polynucleotide agent can be administered via different routes. For example, although not intended to be limiting, the first (or first few) administration may be performed subcutaneously, and one or more additional administrations may be oral and/or systemic.

[0118] For embodiments of the present invention in which it is desirable to administer the LPA dsRNA agent or LPA antisense polynucleotide agent systemically, the LPA dsRNA agent or LPA antisense polynucleotide agent may be formulated for parenteral administration by injection, for example by bolus or continuous infusion. Injectable formulations may be present in unit dosage forms, such as ampoules or multi-dose containers, with or without preservatives. LPA dsRNA agent formulations (also referred to as pharmaceutical compositions) may be in the form of suspensions, solutions, or emulsions in oily or aqueous carriers, and may contain excipients, such as suspending agents, stabilizers, and/or dispersants.

[0119] Formulations for parenteral administration include sterile aqueous or non-aqueous solutions, suspensions and emulsions. Examples of non-aqueous solvents are propylene glycol, polyethylene glycol, vegetable oils such as olive oil, and injectable organic esters such as ethyl oleate. Aqueous carriers include water, alcohol/aqueous solutions, emulsions or suspensions, including saline and buffer media. Parenteral carriers include sodium chloride solution, Ringer's glucose solution, glucose and sodium chloride solution, lactate Ringer's solution or fixed oil. Intravenous excipients include fluid and nutritional supplements, electrolyte supplements (such as those based on Ringer's glucose solution), and the like. Preservatives and other additives may also be present, such as antimicrobial agents, antioxidants, chelating agents, inert gases, and the like. Other forms of administration, such as intravenous administration, will result in lower doses. If the response of the subject is insufficient at the initial dose, a higher dose can be used within the tolerance of the patient (or the dose may be effectively increased by a different, more localized delivery route). Multiple doses per day may be used as needed to achieve appropriate systemic or local levels of one or more LPA dsRNA agents or LPA antisense polynucleotide agents and to achieve appropriate reduction in LPA protein levels.

[0120] In other embodiments, the method of the present invention comprises the use of delivery carriers, such as biocompatible microparticles, nanoparticles, or implants suitable for implantation into recipients such as subjects. Exemplary biodegradable implants that may be used according to this method are described in PCT publication WO 95/24929 (incorporated herein by reference), which describes a biocompatible, biodegradable polymer matrix for incorporating biomacromolecules.

[0121] Both non-biodegradable and biodegradable polymer matrices may be used in the method of the present invention to deliver one or more LPA dsRNA agents or LPA antisense polynucleotide agents to the subject. In some embodiments, the matrix may be biodegradable. The matrix polymer may be a natural or synthetic polymer. The polymer may be selected based on the desired period of release, typically on the order of a few hours to a year or more. Usually, releases over a period of time between a few hours and three to twelve months can be used. The polymer is optionally in the form of a hydrogel, which can absorb up to about 90% of its weight of water, and is also optionally cross-linked with multivalent ions or other polymers.

[0122] In general, the LPA dsRNA agent or LPA antisense polynucleotide agent may be delivered in some embodiments of the present invention using biodegradable implants by diffusion or by degradation of a polymer matrix. Exemplary synthetic polymers for this use are well known in the art. Using methods known in the art, biodegradable polymers and non-biodegradable polymers can be used to deliver the LPA dsRNA agent or LPA antisense polynucleotide agent. Bioadhesive polymers such as bioerodible hydrogels (H. S. Sawhney, C. P. Pathak and J. A. Hubell in Macromolecules, 1993, 26, 581-587) can also be used to deliver the LPA dsRNA agent or LPA antisense polynucleotide agent to treat LPA-related diseases or conditions. Other suitable delivery systems may include timed release, delayed release, or sustained release delivery systems. Such systems avoid repeated administration of LPA dsRNA agent or LPA antisense polynucleotide agent, thereby improving convenience for subjects and healthcare professionals. Many types of release delivery systems are available and are known to those of ordinary skill in the art. See, for example, U.S. Pat. Nos. 5,075,109, 4,452,775, 4,675,189, 5,736,152, 3,854,480, 5,133,974, and 5,407,686. In addition, pump-based hardware delivery systems can be used, some of which are also suitable for implantation.

[0123] The use of long-term sustained release implants may be adapted for the prophylactic treatment of subjects and subjects at risk of developing recurrent LPA-related diseases or conditions. As used herein, long-term release refers to the construction and arrangement of implants to deliver a therapeutic level of an LPA dsRNA agent or an LPA antisense polynucleotide agent for at least up to 10 days, 20 days, 30 days, 60 days, 90 days, six months, one year or more. Long-term sustained release implants are well known to those of ordinary skill in the art and include some of the release systems described above.

[0124] Therapeutic formulations of LPA dsRNA agent or LPA antisense polynucleotide agent may be prepared for storage by mixing molecules or compounds with the desired purity with an optional pharmaceutically acceptable carrier, excipient or stabilizer [Remington's Pharmaceutical Sciences 21^{st} edition, (2006)] in the form of a lyophilized formulation or an aqueous solution. Acceptable carriers, excipients, or stabilizers are nontoxic to recipients at the dosages and concentrations employed, and include buffers such as phosphate, citrate, and other organic acids; antioxidants including ascorbic acid and methionine; preservatives (such as octadecyldimethylbenzyl ammonium chloride; hexamethonium chloride; benzalkonium chloride, benzethonium chloride; phenol, butanol or benzyl alcohol; parabens such as methyl or propyl paraben; catechol; resorcinol; cyclohexanol; 3-pentanol; and m-cresol); low molecular weight (less than about 10 residues) polypeptide; proteins, such as serum albumin, gelatin, or immunoglobulins; hydrophilic polymers such as polyvinylpyrrolidone; amino acids such as glycine, glutamine, asparagine, histidine, arginine, or lysine; monosaccharides, disaccharides, and other carbohydrates including glucose, mannose, or dextrins; chelating agents such as EDTA; sugars such as sucrose, mannitol, trehalose or sorbitol; salt forming counter-ions such as sodium; metal complexes (e.g., Zn-protein complexes); and/or non-ionic surfactants such as TWEEN®, PLURONICS® or polyethylene glycol (PEG).

### Cells, Subjects and Controls

[0125] The methods of the present invention may be used in conjunction with cells, tissues, organs, and/or subjects. In some aspects of the present invention, the subjects are humans or vertebrate mammals, including but not limited to dogs, cats, horses, cows, goats, mice, rats and primates, such as monkeys. Therefore, the present invention can be used to treat LPA-related diseases or conditions of both human and non-human subjects. In some aspects of the present invention, a subject may be a farm animal, a zoo animal, a domesticated animal, or a non-domesticated animal, and the method of the present invention may be used in veterinary prophylactic and therapeutic regimens. In some embodiments of the present invention, the subject is a person and the method of the present invention can be used in prophylactic and therapeutic regimens for human.

[0126] Non-limiting examples of subjects to which the present invention may be applied are subjects diagnosed with, suspected of having, or at risk of developing a disease or condition associated with LPA expression higher than expected expression, also referred to as an “elevated LPA expression level”. Non-limiting examples of the disease and condition associated with higher than expected level of LPA expression are described elsewhere herein. The method of the present invention can be applied to subjects who have been diagnosed with the disease or condition at the time of treatment, subjects associated with LPA expression higher than expected expression, or subjects who are considered to be at risk of suffering from or developing a disease or condition associated with LPA expression higher than expected expression. In some aspects of the present invention, a disease or condition associated with a LPA expression level higher than expected level is an acute disease or condition; in some aspects of the present invention, a disease or condition associated with a LPA expression level higher than expected level is a chronic disease or condition.

[0127] In one non-limiting example, the LPA dsRNA agent of the present invention is administered to a subject diagnosed with a cardiovascular disease, wherein the cardiovascular disease includes Berger's disease, peripheral arterial disease, coronary artery disease, metabolic syndrome, acute coronary syndrome, aortic stenosis, aortic regurgitation, aortic dissection, retinal artery occlusion, cerebrovascular diseases, mesenteric ischemia, superior mesenteric artery occlusion, renal artery stenosis, stable/unstable angina, acute coronary syndrome, heterozygous or homozygous familial hypercholesterolemia, hyperapolipoprotein beta lipoproteinemia, cerebrovascular atherosclerosis, cerebrovascular diseases and venous thrombosis, stroke, atherosclerosis, thrombosis, coronary heart diseases or aortic stenosis and/or any other diseases or pathologies related to elevated levels of Lp(a)-containing particles. The method of the present invention can be applied to subjects who have been diagnosed with the disease or condition at the time of treatment, or who are considered to be at risk of suffering from or developing the disease or condition.

[0128] In another non-limiting example, the LPA dsRNA agent of the present invention is administered to treat a disease or disorder that is caused by or associated with renin-angiotensin-aldosterone system (RAAS) activation, or whose symptoms or progression responds to RAAS inactivation. The term “LPA-related disease” includes a disease, disorder, or condition that benefits from reduced LPA expression. These diseases are usually associated with high blood pressure. Non-limiting examples of LPA-related diseases include cardiovascular diseases, including Berger's disease, peripheral arterial disease, coronary artery disease, metabolic syndrome, acute coronary syndrome, aortic stenosis, aortic regurgitation, aortic dissection, retinal artery occlusion, cerebrovascular diseases, mesenteric ischemia, superior mesenteric artery occlusion, renal artery stenosis, stable/unstable angina, acute coronary syndrome, heterozygous or homozygous familial hypercholesterolemia, hyperapolipoprotein beta lipoproteinemia, cerebrovascular atherosclerosis, cerebrovascular diseases and venous thrombosis, stroke, atherosclerosis, thrombosis, coronary heart diseases or aortic stenosis and/or any other diseases or pathologies related to elevated levels of Lp(a)-containing particles.

[0129] Cells to which the method of the present invention can be applied include in vitro, in vivo and ex vivo cells. Cells may be in the subject, in culture and/or suspension, or in any other suitable state or condition. Cells to which the method of the present invention may be applied may be liver cells, hepatocytes, heart cells, pancreatic cells, cardiovascular cells, kidney cells, or other types of vertebrate cells, including human and non-human mammalian cells. In some aspects of the present invention, cells to which the method of the present invention may be applied are healthy normal cells, which are not known to be diseased cells. In some embodiments of the present invention, the methods and compositions of the present invention are applied to cells such as liver cells, hepatocytes, heart cells, pancreatic cells, cardiovascular cells, and/or kidney cells. In certain aspects of the present invention, the control cells are normal cells, but it should be understood that cells with a disease or condition may also be used as control cells in particular cases, such as in the case of comparing the results of treated cells with a disease or condition to the results of untreated cells with the disease or condition, and the like.

[0130] According to the method of the present invention, LPA polypeptide levels can be determined and compared to LPA polypeptide control levels. The control may be a predetermined value, which may take various forms. It can be a single cutoff, such as median or average. It can be established based on comparison groups, for example in groups with normal levels of LPA polypeptide and groups with increased levels of LPA polypeptide activity. Another non-limiting example of the comparison group may be a population with one or more symptoms or diagnoses of an LPA-related disease or condition versus a population without the one or more symptoms or diagnoses of the disease or condition; a group of subjects to whom the siRNA treatment of the present invention has been administered versus a group of subjects to whom the siRNA treatment of the present invention has not been administered. Typically, controls can be based on apparently healthy normal individuals or apparently healthy cells in the appropriate age group. It will be appreciated that, in addition to predetermined values, a control according to the present invention may be a material sample tested in parallel with the experimental material. Examples include samples from control populations or control samples produced by manufacturing for parallel test with experimental samples. In some embodiments of the present invention, the control may include cells or subjects that are not contacted or treated with the LPA dsRNA agent of the present invention, in which case the control level of the LPA polypeptide may be compared to the level of the LPA polypeptide in cells or subjects in contact with an LPA dsRNA agent or an LPA antisense polynucleotide agent of the present invention.

[0131] In some embodiments of the present invention, the control level may be an LPA polypeptide level determined for the subject, wherein the LPA polypeptide level determined for the same subject at different times is compared to the control level. In one non-limiting example, levels of LPA are determined in biological samples obtained from subjects who have never been received the LPA treatment according to the present invention. In some embodiments, the biological sample is a serum sample. LPA polypeptide levels measured in samples obtained from the subject may serve as baseline or control values for the subject. After one or more LPA dsRNA agents are administered to the subject according to the therapeutic method of the present invention, one or more additional serum samples may be obtained from the subject, and the LPA polypeptide levels in the subsequent one or more samples may be compared to the subject's control/baseline levels. Such comparisons can be used to assess onset, progression, or regression of LPA-related diseases or conditions in subjects. For example, the level of the LPA polypeptide in the baseline sample obtained from the subject is higher than the level obtained from the same subject after the LPA dsRNA agent or the LPA antisense polynucleotide agent of the present invention is administered to the subject, indicating regression of the LPA-related disease or condition and the efficacy of the administered LPA dsRNA agent of the present invention in treating the LPA-related disease or condition.

[0132] In certain aspects of the present invention, one or more values of the LPA polypeptide levels determined for a subject may be used as a control value and used to later compare LPA polypeptide levels in the same subject, thereby allowing for the evaluation of changes from the “baseline” LPA polypeptide level in the subject. Thus, where the initial level is used as the control level of the subject, the initial LPA polypeptide level may be used to display and/or determine the level of the LPA polypeptide in the subject that the methods and compounds of the present invention can reduce in the subject.

[0133] Using the method of the present invention, the LPA dsRNA agent and/or the LPA antisense polynucleotide agent of the present invention can be administered to the subject. Such dsRNAi agents include, for example, the duplexes shown in Table 1. In some other embodiments, such dsRNAi agents include duplex variants, such as those shown in Table 1. The efficacy of the administration and treatment of the present invention may be evaluated as follows: after administration and treatment, the level of the LPA polypeptide in the serum sample obtained from the subject is reduced by at least 0.5%, 1%, 5%, 10%, 20%, 30%, 40%, 50%, 60%, 70%, 80%, 90%, 95% or more compared to the level of the LPA polypeptide before administration in the serum sample obtained from the subject at a previous time point, or compared to the level of a non-contact control (e.g., the level of the LPA polypeptide in the control serum sample). It will be appreciated that the levels of LPA polypeptides are all associated with the levels of LPA gene expression. Some embodiments of the method of the present invention include administering the LPA dsRNA and/or the LPA antisense agent of the present invention to the subject in an amount that effectively inhibits the expression of the LPA gene, thereby reducing the level of the LPA polypeptide in the subject.

[0134] Some embodiments of the present invention include determining the presence, absence and/or amount (herein also referred to as level) of the LPA polypeptide from one or more biological samples obtained from one or more subjects. This determination can be used to evaluate the efficacy of the therapeutic method of the present invention. For example, the methods and compositions of the present invention may be used to determine the level of the LPA polypeptide in a biological sample obtained from a subject previously treated with the LPA dsRNA agent and/or the LPA antisense agent of the present invention. After administration and treatment, the level of the LPA polypeptide in the serum sample obtained from the subject is reduced by at least 0.5%, 1%, 5%, 10%, 20%, 30%, 40%, 50%, 60%, 70%, 80%, 90%, 95% or more compared to the level of the LPA polypeptide before administration in the serum sample obtained from the subject at a previous time point, or compared to the level of a non-contact control (e.g., the level of the LPA polypeptide in the control serum sample), the efficacy level of the treatment administered to the subject is indicated.

[0135] In some embodiments of the present invention, the physiological characteristics of the LPA-related disease or condition determined for the subject may serve as a control result, and the determination results of the physiological characteristics of the same subject at different times are compared to the control result. In one non-limiting example, the Lp(a) level in blood (and/or other physiological characteristics of an LPA disease or condition) is measured from a subject that has never been received the LPA treatment according to the present invention, and may be used as a baseline or control value for the subject. After one or more LPA dsRNA agents are administered to the subject according to the therapeutic method of the present invention, Lp(a) levels in the blood are measured and compared to the control/baseline levels of the subject, respectively. Such comparisons can be used to assess onset, progression, or regression of LPA-related diseases or conditions in subjects. For example, if the baseline LPA level obtained from the subject is higher than the LPA level measured from the same subject after the LPA dsRNA agent or the LPA antisense polynucleotide agent of the present invention is administered to the subject, indicating regression of the LPA-related disease or condition and the efficacy of the administered LPA dsRNA agent of the present invention in treating the LPA-related disease or condition.

[0136] In some aspects of the present invention, the value of one or more physiological characteristics of an LPA-related disease or condition determined for a subject may be used as a control value for later comparisons of physiological characteristics of the same subject, thereby allowing for the evaluation of changes from the “baseline” physiological characteristics of the subject. Thus, an initial physiological characteristic in an individual may be obtained, and measurement of the initial physiological characteristic is used as a control of the subject, and to show and/or determine the effect that the method and compound of the present invention may be used to reduce the level of the LPA polypeptide in the individual. Using the method of the present invention, the LPA dsRNA agent and/or the LPA antisense polynucleotide agent of the present invention can be administered to the subject in an effective amount for the treatment of an LPA disease or condition. The efficacy of administration and treatment of the present invention may be evaluated by determining changes in one or more physiological characteristics of an LPA disease or condition. In one non-limiting example, the Lp (a) level in blood of a subject is reduced until the Lp (a) levels in blood of the subject were within the normal range, as compared to Lp (a) level in blood obtained from the subject at a previous time point, or compared to LPA level in a non-contact control.

[0137] Some embodiments of the present invention include determining the presence, absence, and/or change of physiological characteristics of an LPA-related disease or condition using methods such as, but not limited to: (1) measuring Lp(a) levels in the blood of a subject; (2) evaluating the physiological characteristics of one or more biological samples obtained from one or more subjects; (3) or performing a physical examination on the subject. This determination can be used to evaluate the efficacy of the therapeutic method of the present invention.

### Kit

[0138] A kit comprising one or more LPA dsRNA agents and/or LPA antisense polynucleotide agents and instructions for their use in the method of the present invention is also within the scope of the present invention. The kit of the present invention may comprise one or more of an LPA dsRNA agent, an LPA sense polynucleotide agent, and an LPA antisense polynucleotide agent that can be used to treat a LPA-related disease or condition. A kit comprising one or more LPA dsRNA agents, LPA sense polynucleotide agents and LPA antisense polynucleotide agents may be prepared for use in the therapeutic methods of the present invention. The components of the kit of the present invention can be packaged in aqueous medium or freeze-dried form. The kit of the present invention may comprise a support that is partitioned to enclosedly receive one or more container devices or a series of container devices (e.g., test tubes, vials, flasks, bottles, syringes, etc.) therein. A first container device or a series of container devices may comprise one or more compounds, such as LPA dsRNA agent and/or LPA sense or antisense polynucleotide agent. The second container device or series of container devices may comprise a targeting agent, a labelling agent, a delivery agent, etc., which may be included as part of the LPA dsRNA agent and/or the LPA antisense polynucleotide administered in an embodiment of the therapeutic method of the present invention.

[0139] The kit of the present invention may also contain instructions. Instructions are usually in writing and will provide guidance for carrying out the treatment embodied by the kit and making decisions based on that treatment.

[0140] The following examples are provided to illustrate specific examples of the practice of the present invention and are not intended to limit the scope of the present invention. It is evident to those of ordinary skill in the art that the present invention can be applied to a variety of compositions and methods.

### EXAMPLE

### Example 1. Synthesis of RNAi Agent

[0141] The LPA RNAi agent duplex shown in Tables 2-3 above was synthesized according to the following general procedure:

[0142] Sense and antisense strand sequences of siRNA were synthesized on an oligonucleotide synthesizer using a well-established solid-phase synthesis method based on phosphoramidite chemistry. Growth of the oligonucleotide chain is achieved through a 4-step cycle: de-protection, condensation, capping, and an oxidation or sulfurization step for the addition of each nucleotide. Synthesis was performed on a solid support made of controllable porous glass (CPG, 1000 Å). Monomer phosphoramidite was purchased from commercial sources. phosphoramidites having GalNAc ligand clusters (GLPA1 and GLPA2 as non-limiting examples) were synthesized according to the procedure of Examples 2-3 herein. For siRNAs used for in vitro screening (Table 2), synthesis was performed at the 2 μmol scale; for siRNAs used for in vivo test (Tables 3, 4 to 5), synthesis scale was 5 μmol or greater. In the case where the GalNAc ligand (GLO-0 as a non-limiting example) was linked to the 3′-end of the sense strand, a CPG solid support with the GalNAc ligand attached was used. In the case where the GalNAc ligand (GLS-1 or GLS-2 as a non-limiting example) was linked to the 5′-end of the sense strand, GalNAc phosphoramidite (GLPA1 or GLPA2 as a non-limiting example) was used for the final coupling reaction. Trichloroacetic acid (TCA) in 3% dichloromethane was used to deprotect the protective group, i.e., 4,4′-dimethoxytriphenylmethyl (DMT). 5-ethylthio-1H-tetrazole was used as an activator. I₂ in THF/Py/H₂O and phenylacetyl disulfide (PADS) in pyridine/MeCN were used for oxidation and sulfurization reactions, respectively. After the final solid-phase synthesis step, the solid support-bound oligomer was cleaved by treatment with a 1:1 volume of 40 wt % aqueous methylamine solution and 28% ammonium hydroxide solution and the protective group was removed. The crude mixture was concentrated to synthesize siRNAs for in vitro screening. The remaining solids were dissolved in 1.0 M NaOAc and ice-cold EtOH was added to precipitate a single-stranded product as a sodium salt, which could be used for annealing without further purification. To synthesize siRNAs for in vivo testing, the crude single-stranded product was further purified by ion-pair reversed-phase HPLC (IP-RP-HPLC). Purified single-stranded oligonucleotide products from IP-RP-HPLC were converted to sodium salts by dissolving them in 1.0 M NaOAc and precipitating them by adding ice-cold EtOH. Annealing of sense and antisense oligonucleotides by equimolar complementation was performed in water to form a double-stranded siRNA product, which was lyophilized to provide a fluffy white solid.

### Example 2. Preparation of Intermediate-A and Intermediate-B

[0143] Intermediate-A was synthesized by treating commercially available galactosamine pentaacetate with trimethylsilyl trifluoromethanesulfonate (TMSOTf) in dichloromethane (DCM), as shown in scheme 1 below. Then glycosylation was performed with Cbz-protected 2-(2-aminoethoxy)ethan-1-ol to give compound II. The Cbz protective group was removed by hydrogenation to provide intermediate-A as a trifluoroacetate (TFA) salt. Intermediate-B was synthesized based on the same scheme, except for the use of Cbz-protected 2-(2-(2-aminoethoxy)ethoxy)ethan-1-ol as feedstock.

[chemical structure]

[chemical structure]

[0144] TMSOTf (17.1 g, 77.2 mmol) was added to the solution of compound I (20.0 g, 51.4 mmol) in 100 mL of 1,2-dichloroethane (DCE). The resulting reaction liquid was stirred at 60° C. for 2 h and then stirred at 25° C. for 1 h; Cbz-protected 2-(2-aminoethoxy)ethan-1-ol (13.5 g, 56.5 mmol) was dried over 4 Å powdered molecular sieves (10 g) in DCE (100 mL) and added dropwise to the above reaction liquid at 0° C. under N₂ atmosphere. The resulting reaction mixture was stirred at 25° C. for 16 hours under N₂ atmosphere. The reaction mixture was filtered and washed with saturated NaHCO₃ (200 mL), water (200 mL) and saturated saline (200 mL). The organic layer was dried over anhydrous Na₂SO₄, filtered and concentrated under reduced pressure to give the crude product, which was triturated with 2-methyltetrahydrofuran/heptane (5/3, v/v, 1.80 L) for 2 h. The resulting mixture was filtered and dried to give compound II (15.0 g, yield 50.3%) as a white solid.

[0145] 10% Pd/C (1.50 g) was carefully added to a dry and argon-purged hydrogenation bottle, and then 10 mL of tetrahydrofuran (THF) was added, followed by a solution of compound II (15.0 g, 26.4 mmol) in THE (300 mL) and TFA (trifluoroacetic acid, 3.00 g, 26.4 mmol). The resulting mixture was degassed and purged with H₂ three times and stirred at 25° C. under H₂ atmosphere (45 psi) for 3 h. Thin layer chromatography (TLC, solvent:DCM:MeOH=10:1) indicated that compound II was completely consumed. The reaction mixture was filtered and concentrated under reduced pressure. The residue was dissolved in anhydrous DCM (500 mL) and concentrated. The process was repeated 3 times to give intermediate-A as a foamy white solid (14.0 g, yield 96.5%). ¹H NMR (400 MHz DMSO-d₆): δ ppm 7.90 (d, J=9.29 Hz, 1H), 7.78 (br s, 3H), 5.23 (d, J=3.26 Hz, 1H), 4.98 (dd, J=11.29, 3.26 Hz, 1H), 4.56 (d, J=8.53 Hz, 1H), 3.98-4.07 (m, 3H), 3.79-3.93 (m, 2H), 3.55-3.66 (m, 5H), 2.98 (br d, J=4.77 Hz, 2H), 2.11 (s, 3H), 2.00 (s, 3H), 1.90 (s, 3H), 1.76 (s, 3H).

[0146] Intermediate-B was synthesized using a similar procedure to that used for the synthesis of Intermediate-A. ¹H NMR (400 MHz DMSO-d₆): δ ppm 7.90 (br d, J=9.03 Hz, 4H), 5.21 (d, J=3.51 Hz, 1H), 4.97 (dd, J=11.1 Hz, 1H), 4.54 (d, J=8.53 Hz, 1H), 3.98-4.06 (m, 3H), 3.88 (dt, J=10.9 Hz, 1H), 3.76-3.83 (m, 1H), 3.49-3.61 (m, 9H), 2.97 (br s, 2H), 2.10 (s, 3H), 1.99 (s, 3H), 1.88 (s, 3H), 1.78 (s, 3H). Mass spectrometry calculated C₂₀H₃₄N₂O₁₁: 478.22; measured: 479.3 (M+H⁺).

### Example 3. Synthesis of GalNAc Ligand Cluster Phosphoramidites GLPA1, GLPA2, and GLPA15

[0147] GLPA1 and GLPA2 were prepared according to the following scheme 2. Starting with benzyl-protected propane-1,3-diamine, alkylation was performed using tert-butyl 2-bromoacetate to give triester compound I. The benzyl protective group is removed by hydrogenation to give secondary amine compound II. The amide was coupled with 6-hydroxycaproic acid to give compound III. The tert-butyl protective group was then removed upon treatment with HCl in dioxane to form triacid compound IV. Amide coupling between triacid compound IV and intermediate-A or intermediate-B was performed to provide compound Va or Vb. Phosphoramidite GLPA1 or GLPA2 was synthesized by phosphitylation of compound Va or Vb with 2-cyanoethyl N,N-diisopropylchlorophosphoramidite and a catalytic amount of 1H-tetrazole.

[chemical structure]

[chemical structure]

[0148] Tert-butyl 2-bromoacetate (23.7 g, 121 mmol) was added to a solution of N-benzyl-1,3-propanediamine (5.00 g, 30.4 mmol) in dimethylformamide (DMF, 100 mL); then diisopropylethylamine (DIEA, 23.61 g, 182 mmol) was added dropwise. The resulting reaction mixture was stirred at 25-30° C. for 16 h. LCMS showed that N-benzyl-1,3-propanediamine was completely consumed. The reaction mixture was diluted with H₂O (500 mL) and extracted with EtOAc (500 mL×2). The combined organics were washed with saturated brine (1 L), dried over anhydrous Na₂SO₄, filtered, and concentrated under reduced pressure to give a crude product which was purified by silica gel column chromatography (gradient: petroleum ether:ethyl acetate 20:1 to 5:1). A compound I was obtained (12.1 g, yield 78.4%) as a colorless oil. ¹H NMR (400 MHz, CDCl₃): δ ppm 7.26-7.40 (m, 5H), 3.79 (s, 2H), 3.43 (s, 4H), 3.21 (s, 2H), 2.72 (dt, J=16.9, 7.34 Hz, 4H), 1.70 (quin, J=7.2 Hz, 2H), 1.44-1.50 (m, 27H).

[0149] The dried hydrogenation bottle was purged 3 times with argon. Pd/C (200 mg, 10%) was added, followed by MeOH (5 mL), followed by a solution of compound I (1.00 g, 1.97 mmol) in MeOH (5 mL). The reaction mixture was degassed in vacuum and refilled with H₂. This process was repeated 3 times. The mixture was stirred at 25° C. for 12 h under H₂ atmosphere (15 psi). LCMS showed that compound I was completely consumed. The reaction mixture was filtered under reduced pressure under N₂ atmosphere. The filtrate was concentrated under reduced pressure to give compound II (655 mg, yield 79.7%) as a yellow oil, which could be used in the next step without further purification. ¹H NMR (400 MHz, CDCl₃): δ ppm 3.44 (s, 4H), 3.31 (s, 2H), 2.78 (t, J=7.1 Hz, 2H), 2.68 (t, J=6.9 Hz, 2H), 1.88 (br s, 1H), 1.69 (quin, J=7.03 Hz, 2H), 1.44-1.50 (s, 27H). A mixture of compound II (655 mg, 1.57 mmol), 6-hydroxyhexanoic acid (249 mg, 1.89 mmol), DIEA (1.02 g, 7.86 mmol), 1-ethyl-3-(3-dimethylaminopropyl)carbodiimide hydrochloride (EDCI, 904 mg, 4.72 mmol), and 1-hydroxybenzotriazole (HOBt, 637 mg, 4.72 mmol) in DMF (6 mL) was degassed and purged with N₂ three times; then stirred at 25° C. under N₂ atmosphere for 3 h. The LCMS indicated the desired product. The reaction mixture was diluted with H₂O (10 mL) and extracted with EtOAc 20 mL (10 mL×2). The organics were combined, washed with saturated brine (20 mL), dried with anhydrous Na₂SO₄, filtered and concentrated to obtain a crude product which was purified by silica gel column chromatography (gradient: petroleum ether:ethyl acetate from 5:1 to 1:1) to give compound III (650 mg, yield 77.8%) as a yellow oil. ¹H NMR (400 MHz, CDCl₃): δ ppm 3.90-3.95 (s, 2H), 3.63 (t, J=6.40 Hz, 2H), 3.38-3.45 (m, 6H), 2.72 (t, J=6.65 Hz, 2H), 2.40 (t, J=7.28 Hz, 2H), 1.55-1.75 (m, 8H), 1.44 (s, 27H). Mass spectrometry calculated C₂₇H₅₀N₂O₈: 530.36; measured: 531.3 (M+H⁺).

[0150] A mixture of compound III (5.5 g, 10.3 mmol) in HCl/dioxane (2 M, 55 mL) was stirred at 25° C. for 3 h. LCMS showed complete consumption of compound III. The reaction mixture was filtered, washed with EtOAc (50 mL), and dried under reduced pressure to give a crude product. The crude product was dissolved in CH₃CN (50 mL) and the volatiles were removed in vacuum. The process was repeated 3 times to give compound IV (2.05 g, 54.5% yield) as a white solid. ¹H NMR (400 MHz, D₂O): δ ppm 4.21 (s, 1H), 4.07 (d, J=4.5 Hz, 4H), 3.99 (s, 1H), 3.45-3.52 (m, 3H), 3.42 (t, J=6.5 Hz, 1H), 3.32-3.38 (m, 1H), 3.24-3.31 (m, 1H), 2.37 (t, J=7.4 Hz, 1H), 2.24 (t, J=7.4 Hz, 1H), 1.99 (dt, J=15.5, 7.53 Hz, 1H), 1.85-1.94 (m, 1H), 1.85-1.94 (m, 1H), 1.39-1.56 (m, 4H), 1.19-1.31 (m, 2H).

[0151] A mixture of compound IV (500 mg, 1.05 mmol), intermediate-A (2.02 g, 3.67 mmol), DIEA (813 mg, 6.30 mmol), EDCI (704 mg, 3.67 mmol), and HOBt (496 mg, 3.67 mmol) in DMF (10 ml) was degassed and purged with N₂ three times, and then the mixture was stirred at 25° C. under N₂ atmosphere for 3 h. The LCMS indicated the desired product. The reaction mixture was quenched by adding H₂O (10 mL) and extracted with DCM (10 mL×2). The combined organics were extracted with 10% citric acid (20 mL). The aqueous phase was neutralized with saturated NaHCO₃ solution and re-extracted with DCM (10 mL×2). The organics were dried over sodium sulfate, filtered and concentrated under reduced pressure to give compound Va (570 mg, 0.281 mmol, 26.8% yield) as a white solid. ¹H NMR: (400 MHz, CDCl₃) ppm δ 7.84-8.12 (m, 3H), 6.85-7.15 (m, 2H), 6.66-6.81 (m, 1H), 5.36 (br d, J=2.7 Hz, 3H), 5.11-5.27 (m, 3H), 4.63-4.85 (m, 3H), 3.90-4.25 (m, 18H), 3.37-3.75 (m, 28H), 3.15-3.28 (m, 4H), 2.64 (brd, J=6.53 Hz, 2H), 2.30-2.46 (m, 2H), 2.13-2.18 (m, 9H), 2.05 (s, 9H), 1.94-2.03 (m, 18H), 1.68 (br s, 2H), 1.45 (br s, 2H), 1.12 (br t, J=7.0 Hz, 2H).

[0152] Tetrazole diisopropylammonium (30.3 mg, 0.177 mmol) was added to a solution of compound Va (260 mg, 0.161 mmol) in anhydrous DCM (5 mL); then 3-bis(diisopropylamino)phosphoryloxypropionitrile (194 mg, 0.645 mmol) was added dropwise at ambient temperature under N₂. The reaction mixture was stirred at 20 to 25° C. for 2 h. LCMS indicated that compound Va was completely consumed. After cooling to −20° C., the reaction mixture was added to a stirred brine/saturated NaHCO₃ (1:1, 5 mL) solution at 0° C. After stirring for 1 minute, DCM (5 mL) was added. Stratification occurred. The organic layer was washed with brine/saturated NaHCO₃ aqueous solution (1:1, 5 mL), dried over Na₂SO₄, filtered and concentrated to a volume of approximately 1 mL. The residual solution was added dropwise to 20 mL of methyl tert-butyl ether (MTBE) under stirring. This resulted in the precipitation of a white solid. The mixture was centrifuged and the solid was collected. The solid was redissolved in 1 mL of DCM and precipitated by addition of MTBE (20 mL). The solid was again separated by centrifugation. The collected solid was dissolved in anhydrous CH₃CN. The volatile was removed. This process was repeated twice more to give the GalNAc ligand phosphoramidite compound GLPA1 (153 mg, 84.4 μmol) as a white solid. ¹H NMR (400 MHz, CDCl₃): ppm δ 7.71-8.06 (m, 2H), 6.60-7.06 (m, 3H), 5.37 (br d, J=3.0 Hz, 3H), 5.18-5.32 (m, 3H), 4.70-4.86 (m, 3H), 3.92-4.25 (m, 18H), 3.42-3.85 (m, 30H), 3.25 (m, 4H), 2.59-2.75 (m, 4H), 2.27-2.44 (m, 2H), 2.15-2.20 (s, 9H) 2.07 (s, 9H), 1.96-2.03 (m, 18H), 1.65 (br s, 4H), 1.44 (br d, J=7.28 Hz, 2H), 1.14-1.24 (m, 12H). ³¹P NMR (CDCl₃): ppm δ 147.15.

[0153] The GalNAc ligand phosphoramidite compound GLPA2 was synthesized using the same procedure, except for using the intermediate-B. ¹H NMR (400 MHz, CDCl₃): ppm δ 7.94-8.18 (m, 1H), 7.69 (br s, 1H), 6.66-7.10 (m, 3H), 5.35 (d, J=3.5 Hz, 3H), 5.07-5.25 (m, 3H), 4.76-4.86 (m, 3H), 4.01-4.31 (m, 10H), 3.91-4.01 (m, 8H), 3.74-3.86 (m, 4H), 3.52-3.71 (m, 30H), 3.42-3.50 (m, 6H), 3.15-3.25 (m, 4H), 2.52-2.70 (m, 4H), 2.22-2.45 (m, 2H), 2.15-2.22 (s, 9H), 2.06 (s, 9H), 1.95-2.03 (m, 18H), 1.77 (br s, 2H), 1.58-1.66 (m, 4H), 1.40 (m, 2H), 1.08-1.24 (m, 12H). ³¹P NMR (CDCl₃): ppm δ 147.12.

[0154] GLPA15 was prepared according to scheme 3 below.

[chemical structure]

[chemical structure]

[0155] To a solution of intermediate compound II (275 g, 660 mmol, 1.00 eq.) in dichloromethane (2.75 L) was added triethylamine (133 g, 1.32 mol, 2.00 eq.), followed by the dropwise addition of Cbz-Cl (169 g, 990 mmol, 1.50 eq.). The reaction liquid was stirred at 25° C. for 2 h, and LCMS showed that compound II was completely converted. The reaction liquid was washed with a saturated NaHCO₃ solution (800 mL) and saturated sodium chloride aqueous solution (500 mL) in sequence, and the organic phase was dried over anhydrous Na₂SO₄. After being filtered to remove the desiccant, the filtrate was concentrated to dry. The residue was subjected to column chromatography (SiO₂, PE/EA=100/1 to 5/1) to give compound 5 (290 g, 527 mmol, yield 75.7%) as a colorless oil. ¹H NMR (400 MHz in DMSO-d₆): δ ppm 7.23-7.40 (m, 5H), 5.00-5.12 (m, 2H), 3.86-3.95 (m, 2H), 3.23-3.39 (m, 6H), 2.55-2.67 (m, 2H), 1.56-1.64 (m, 2H), 1.31-1.46 (m, 27H). MS (ESI) [M+H]⁺ m/z: 551.6.

[0156] HCOOH (2.9 L) was added to compound 5 (145 g, 263 mmol, 1.00 eq), and the solution was stirred at 60° C. for 12 h. LCMS showed that compound 5 was completely converted. 1.5 L of toluene and 1.5 L of acetonitrile were added to the reaction liquid and the mixture was concentrated under reduced pressure to about 500 mL. Then toluene/acetonitrile (1:1, about 750 mL) was added and the mixture was concentrated to about 500 mL. Then acetonitrile (about 1000 mL) was added and the mixture was concentrated to dryness. The crude product was crushed with 700 mL of acetonitrile at 60° C. for 2 h and filtered. The solid was collected and dried to obtain white solid compound 6 (105 g, quantitative). ¹H NMR (400 MHz in DMSO-d₆): δ ppm 7.26-7.40 (m, 5H), 5.02-5.10 (m, 2H), 3.89-4.00 (m, 2H), 3.36-3.45 (m, 4H), 3.24-3.34 (m, 2H), 2.59-2.72 (m, 2H), 1.40 (s, 2H). MS (ESI) [M+H]⁺ m/z: 383.0.

[0157] TBTU (327 g, 1.02 mol, 3.90 eq.) and triethylamine (212 g, 2.09 mol, 8.00 eq.) were added to a solution of compound 6 (100 g, 261 mmol.) and intermediate-A (502 g, 915. mmol, 3.50 eq.) in DMF (1.0 L), and the reaction was carried out at 25° C. for 1 h. LCMS showed that the conversion of compound 6 was complete. The reaction liquid was added to 4000 mL of water and extracted with methyl tert-butyl ether (2000 mL, in two portions) to remove impurities, and the remaining aqueous phase was extracted with dichloromethane (3000 mL, in two portions). The dichloromethane phase was washed successively with 10% aqueous citric acid solution (2000 mL, in two portions), saturated NaHCO₃ (2.0 L, in two portions), and saturated brine (2.0 L), and dried over anhydrous Na₂SO₄. The filtrate was filtered and concentrated under reduced pressure to give compound 8 (260 g, 159 mmol, yield 60.9%) as a white solid. ¹H NMR (400 MHz in DMSO-d₆): δ ppm 7.99-8.08 (m, 2H), 7.93 (br d, J=5.50 Hz, 1H), 7.79-7.86 (m, 3H), 7.26-7.39 (m, 5H), 5.22 (d, J=3.13 Hz, 3H), 4.95-5.08 (m, 5H), 4.54 (br d, J=8.38 Hz, 3H), 4.03 (s, 9H), 3.81-3.93 (m, 5H), 3.76 (br d, J=4.88 Hz, 3H), 3.44-3.62 (m, 10H), 3.34-3.43 (m, 6H), 3.24 (br d, J=6.13 Hz, 7H), 3.02-3.09 (m, 4H), 2.40-2.47 (m, 2H), 2.10 (s, 9H), 1.99 (s, 9H), 1.89 (s, 9H), 1.77 (s, 9H), 1.57-1.68 (m, 2H). MS (ESI) [M+H]⁺ m/z: 816.4.

[0158] A 2 L hydrogenation autoclave was inertized with argon and dry Pd/C (9 g) was carefully added. MeOH (50 mL) was added to wet the Pd/C, and then a solution of compound 8 (90 g, 55.1 mmol, 1.00 eq.) and trifluoroacetic acid (6.29 g, 55.1 mmol, 1.00 eq.) in MeOH (850 mL) was slowly added under argon atmosphere. The mixture was degassed/subjected to H₂ replacement three times to a hydrogen atmosphere and stirred at 25° C. for 10 h. LCMS showed that compound 8 was completely converted. Pd/C was removed by filtration, and the filtrate was concentrated under reduced pressure to give compound 9 (80 g, yield 90.2%). ¹H NMR (400 MHz in DMSO-d₆): δ ppm 9.12 (br s, 2H), 8.50 (br t, J=5.19 Hz, 1H), 8.10 (br t, J=5.50 Hz, 2H), 7.85-7.91 (m, 3H), 5.22 (d, J=3.25 Hz, 3H), 4.95-5.01 (m, 3H), 4.52-4.58 (m, 3H), 4.03 (s, 9H), 3.84-3.93 (m, 3H), 3.75-3.83 (m, 3H), 3.39-3.61 (m, 16H), 3.23-3.32 (m, 6H), 3.15-3.18 (m, 3H), 2.97-3.05 (m, 2H), 2.54-2.61 (m, 2H), 2.10 (s, 9H), 2.00 (s, 9H), 1.89 (s, 9H), 1.77-1.80 (m, 9H), 1.70-1.76 (m, 2H). MS (ESI) [M+H]⁺ m/z: 749.3.

[0159] Triethylamine (67.8 g, 672 mmol, 4.00 eq) was added to a solution of compound 9 (270 g, 168 mmol, 1.00 eq.) and glutaric anhydride (28.6 g, 252 mmol, 1.50 eq) in dichloromethane (2.7 L). The solution was stirred at 25° C. for 1 h. LCMS showed that compound 9 was completely converted to compound 11. 4-hydroxypiperidine (42.4 g, 420 mmol, 2.50 eq.) and TBTU (107 g, 335 mmol, 2.00 eq.) were added to the reaction liquid, and stirring was continued at 25° C. for 1 h. LCMS showed that the conversion of compound 11 was complete. The reaction was quenched by slowly adding saturated NH₄Cl(3.0 L), the layers were separated, and the aqueous phase was extracted with dichloromethane (2×1000 mL) and combined with the previous organic phase. The combined organic phases were washed with a 1:1 mixture of saturated NaHCO₃(aq) and saturated brine (3.0 L), dried over anhydrous Na₂SO₄, filtered, and concentrated under reduced pressure. The crude product was dissolved in 1.5 L of dichloromethane and the obtained solution was added dropwise to methyl tert-butyl ether (7.5 L). A translucent white precipitate gradually formed during the addition. The precipitate was filtered in vacuum, and the solid was collected and dried in vacuum to give compound 13 (207 g, yield 72.8%) as a white solid. ¹H NMR (400 MHz in DMSO-d₆): δ ppm 8.05 (br d, J=2.00 Hz, 2H), 7.82 (br d, J=7.38 Hz, 3H), 5.21 (br s, 3H), 4.98 (br d, J=10.26 Hz, 3H), 4.72 (br s, 1H), 4.54 (br d, J=7.88 Hz, 3H), 4.03 (br s, 9H), 3.74-3.94 (m, 9H), 3.45-3.71 (m, 12H), 3.40 (br s, 6H), 3.24 (br s, 7H), 3.07 (br d, J=14.13 Hz, 5H), 2.91-3.01 (m, 1H), 2.24-2.44 (m, 5H), 2.20 (br s, 1H), 2.10 (s, 9H), 1.96-2.04 (m, 9H), 1.89 (br s, 9H), 1.74-1.81 (m, 9H), 1.51-1.73 (m, 6H), 1.07-1.36 (m, 3H). MS (ESI) [M+H]⁺ m/z: 848.0.

[0160] 3-bis(diisopropylamino)phosphonyloxypropionitrile (53.3 g, 177 mmol, 1.50 eq.) was added to a solution of compound 13 (200 g, 118 mmol, 1.00 eq.) and tetrazole diisopropylammonium (8.08 g, 47.2 mmol, 0.40 eq) in dichloromethane (2.0 L), and the reaction liquid was stirred at 40° C. for 2 h. LCMS showed that the conversion of compound 13 was complete. The reaction liquid was washed with a 1:1 mixture of saturated NaHCO₃ and saturated sodium chloride aqueous solution (2.0 L), dried over anhydrous Na₂SO₄, and the filtrate was concentrated and the resulting crude product was dissolved in dichloromethane (1.2 L) and the obtained solution was added dropwise to stirred methyl tert-butyl ether (6.0 L). The suspension was filtered, the filter cake was rinsed with methyl tert-butyl ether, the solid was collected and dried in vacuum, and the product was dissolved in dichloromethane (1.0 L) and concentrated to dryness, and the operation was repeated 4 times to remove the residual tert-butyl ether to give GLPA15 (164 g, yield 73.3%). ¹H NMR (400 MHz in DMSO-d6): δ ppm 8.05 (br d, J=6.50 Hz, 2H), 7.81 (br d, J=9.01 Hz, 3H), 5.22 (d, J=3.25 Hz, 3H), 4.98 (dd, J=11.26, 3.25 Hz, 3H), 4.55 (br d, J=8.50 Hz, 3H), 4.03 (s, 9H), 3.64-3.97 (m, 12H), 3.55-3.63 (m, 6H), 3.50 (br s, 5H), 3.40 (br d, J=6.13 Hz, 6H), 3.17-3.30 (m, 9H), 3.07 (br d, J=14.26 Hz, 4H), 2.76 (t, J=5.82 Hz, 2H), 2.18-2.47 (m, 6H), 2.10 (s, 9H), 1.99 (s, 9H), 1.89 (s, 9H), 1.78 (s, 9H), 1.52-1.74 (m, 6H), 1.12-1.19 (m, 12H). 31P NMR (DMSO-d6): ppm δ 145.25. MS (ESI) [M+H]+ m/z: 1895.7.

[0161] In certain studies, methods are provided for linking a targeting group comprising GalNAc (herein also referred to as GalNAc delivery compound) to the 5′-end of a sense strand, comprising using GalNAc phosphoramidite (GLPA1) in the last coupling step of solid phase synthesis and using a synthesis process, such as a synthesis process that is used during oligonucleotide strand extension (i.e., adding nucleotides at the 5′-end of the sense strand) to link GLPA1 to the 5′-end of the sense strand.

[0162] In some studies, methods for linking GalNAc-containing targeting groups to the 3′-end of the sense strand include using a solid support (CPG) comprising GLO-n. In some studies, the method for linking a targeting group comprising GalNAc to the 3′-end of a sense strand includes: linking the GalNAc targeting group to the CPG solid support via an ester bond and using the resulting CPG with the linked GalNAc targeting group when the sense strand is synthesized, which results in the GalNAc targeting group being linked to the 3′-end of the sense strand. Other GalNAc phosphoramidite compounds (GLPAn) can also be obtained by using a reasonable corresponding intermediate and using a method similar to that described herein or known in the art, and can be linked to a suitable position of the siRNA duplex as a targeting group.

### Example 4. Synthesis of Isomannitol Phosphoramidite (Compound 2)

[chemical structure]

[0163] 4,4′-dimethoxytriphenylmethane chloride (DMTrCl, 232 g, 684 mmol, 1.0 eq.) in pyridine (400 ml) was added to a solution of compound A (isomannitol, 100 g, 684 mmol, 1.0 eq.) in pyridine (600 ml), and the mixture was stirred at 25° C. for 16 h. LC-MS showed that compound A was completely consumed and a major peak with the desired mass was detected. The resulting reaction mixture was diluted with water (500 mL), extracted with dichloromethane (500 mL*2), the combined organic phases were washed with brine (500 mL), dried over Na₂SO₄ and concentrated in vacuum to obtain a residue. The residue was purified by column chromatography (DCM/MeOH=100/1 to 50/1, 0.1% Et₃N) to give compound B (150 g, yield 48.9%) as a yellow solid. ¹H NMR: EC4783-404-P1B1_C (400 MHz, DMSO-d₆) δ ppm 7.46 (br d, J=7.63 Hz, 2H) 7.28-7.37 (m, 6H) 7.19-7.25 (m, 1H) 6.90 (br d, J=7.88 Hz, 4H) 4.70 (d, J=6.50 Hz, 1H) 3.99-4.09 (m, 6H) 3.88-3.96 (m, 2H) 3.83 (br dd, J=7.82, 6.94 Hz, 1H) 3.74 (s, 6H) 3.41 (br t, J=8.13 Hz, 1H) 3.05 (t, J=8.44 Hz, 1H) 2.85 (br t, J=7.50 Hz, 1H).

[0164] 2H-tetrazole (0.45 M, 436 mL, 1.1 eq) was added dropwise to a solution of compound B (80.0 g, 178 mmol, 1.0 eq) in dichloromethane (5.0 mL) at 25° C. under N₂ atmosphere, and then a solution of compound C (2-cyanoethyldiisopropylchlorophosphoramidite, 80.6 g, 267 mmol, 85.0 mL, 1.5 eq) in dichloromethane (200 mL) was added dropwise; the reaction mixture was stirred at 25° C. for 1.0 h; LC-MS showed that compound B was completely consumed and a major peak with the desired mass was detected. The resulting reaction mixture was cooled to −20° C., poured into ice-cold NaHCO₃ (500 mL), extracted with dichloromethane (500 mL*3), and the combined organic layers were washed with NaHCO₃/brine=1:1 (300 mL/300 mL), dried over Na₂SO₄, and concentrated in vacuum (35° C.) to obtain a residue (100 mL). The residue was purified by column chromatography (Al₂O₃, DCM/MeOH=100/1 to 50/1, 0.1% Et₃N) to give the the isomannitol phosphoramidite compound 2 (77 g, 119 mmol, yield: 66.5%) as a white solid.

[0165] ¹H NMR: EC4783-423-P1B1_C (400 MHz, DMSO-d₆)

[0166] δ ppm 7.22 (br d, J=7.50 Hz, 2H) 7.05-7.14 (m, 6H) 6.96-7.02 (m, 1H) 6.67 (br dd, J=8.82, 1.81 Hz, 4H) 3.95-4.07 (m, 2H) 3.73-3.83 (m, 1H) 3.62-3.72 (m, 2H) 3.48-3.53 (m, 6H) 3.27-3.37 (m, 3H) 3.11 (s, 6H) 2.82 (td, J=8.54, 2.31 Hz, 1H) 2.47-2.63 (m, 3H) 2.28 (br d, J=1.63 Hz, 3H) 0.82-1.00 (m, 13H).

### Example 5. Preparation of Solid Support Containing Isomannitol Monomer

[chemical structure]

[chemical structure]

represents the macroporous amine methyl polyethylene resin support moiety.

[0167] A 50 L glass kettle was placed under the protection of nitrogen, dichloromethane (19.50 kg) was added to the glass kettle, and the stirring was started. The temperature was controlled at 20-30° C., DMTr-imann (1.47 kg) was added to the glass kettle, triethylamine (1.50 kg), 4-dimethylaminopyridine (0.164 kg) and succinic anhydride (1.34 kg) were added to the reaction kettle. The system was kept warm at 20-30° C. for 18 h and then sampled, and the reaction was terminated. The saturated sodium bicarbonate solution (22.50 kg) was added to the reaction system, stirred for 10-20 min and then stood until layered, the organic phase in the lower layer was transferred, and the aqueous phase in the upper layer was extracted with dichloromethane twice; the organic phases were combined, and dried over anhydrous sodium sulfate, the filtrate was filtrated, and then transferred for rotary evaporation and concentrated to no fraction, forming a gray to quasi-white solid 1.83 kg.

[0168] N,N-dimethylformamide (23.50 kg) was added to a 100 L glass kettle and stirred. The temperature was controlled at 20-30° C. Under nitrogen protection, the product from the previous step, O-benzotriazole-tetramethyluronium hexafluorophosphate (0.33 kg) and N,N-diisopropylethylamine (0.13 kg) were added to the 100 L glass kettle through a solid feeding funnel. After the addition was completed, the mixture was stirred for 10-30 min and then discharged into a 50 L galvanized bucket for standby use. Macroporous amino-methyl resin (3.25 kg) (available from Tianjin Nankai Hecheng Technology Co., Ltd., batch number HA2X1209, loading capacity 0.48 mmol/g) was added to the above-mentioned 100 L solid phase synthesis kettle through a solid feeding funnel, the temperature was controlled at 20-30° C., N,N-dimethylformamide (21.00 kg+21.00 kg) and the reaction liquid to be used in the galvanized bucket in previous step were added to the solid phase synthesis kettle. The system was reacted under temperature-controlled conditions, monitored until a solid load ≥250 umol/g, and the load detection method was UV. The system was subjected to pressure filtration under nitrogen, and the filter cake was rinsed three times with N,N-dimethylformamide (26.00 kg+26.10 kg+26.00 kg), and the filter cake remained in the kettle. CAP.A (4.40 kg+4.42 kg+4.30 kg) and CAP.B (4.40 kg+4.40 kg+4.47 kg) were added into 80 L glass kettle and stirred for 3-8 min. This operation was repeated 3 times for capping. Acetonitrile (18.00 kg+18.00 kg+18.00 kg+17.50 kg+17.50 kg) was added to the solid-phase synthesis kettle. Nitrogen was bubbled for 10-30 min before pressure filtration. This operation was repeated four times. The filter cake was purged with nitrogen in the solid-phase synthesis kettle for 2-4 h and then transferred to a 50 L pressure filter tank. The temperature was controlled at 15-30° C. and drying was continued. The yellow to white solid product after drying was weighted: 3.516 kg.

[0169] Isosorbide residues (imann) may be added to the 5′-end or 3′-end of the oligonucleotide strand by a process well known to those skilled in the art, such as the reverse abasic process (invab), and a targeting group was further added.

### Example 6. In Vitro Screening of LPA siRNA Duplexes Using Huh7 Cells and Dual Fluorescent Reporter Gene Vector

[0170] Huh7 cells were adjusted to the appropriate density and then seeded into 96-well plates. According to the manufacturer's recommendations, at the same time as inoculation, the dual fluorescent reporter gene vector psciCHECK2 containing the target gene was co-transfected with siRNA into Huh7 cells using Lipofectamine RNAiMax (Invitrogen-13778-150). Cells were transfected with test siRNAs or control siRNAs. SiRNAs were tested in triplicate at two concentrations (0.1 nM and 1.0 nM), and 48 h after transfection, Dual-Gn® Luciferase Assay Reagent was added to detect fluorescence values. The ratio of Renilla luminescence to firefly luminescence was calculated and normalized based on the ratio of control siRNA-treated samples to calculate knockdown efficiency. As a result, as shown in Table 4, the duplex AV # used is derived from the sequence corresponding to that shown in Table 2.

TABLE 4
provides experimental results from in vitro studies of inhibition
of LPA expression using a plurality of LPA RNAi agents.

| Compound | % inhibition | | | | | | Mean ± SD | |
|---|---|---|---|---|---|---|---|---|
| ID | 1 nM | | | 0.1 nM | | | 1 nM | 0.1 nM |
| AV00122 | 46.88 | 39.56 | 29.62 | 10.77 | −1.49 | −18.62 | 38.69 ± 8.66 | −10.29 ± 8.57 |
| AV00123 | 42.34 | 26.55 | 36.79 | −7.68 | −31.59 | −10.12 | 35.23 ± 8.01 | −16.46 ± 13.16 |
| AV00124 | 62.09 | 60.30 | 65.01 | 23.45 | 32.98 | 27.50 | 62.47 ± 2.38 | 27.98 ± 4.78 |
| AV00125 | 25.96 | 19.54 | 13.62 | 10.87 | 5.64 | 8.35 | 19.71 ± 6.17 | 8.28 ± 2.62 |
| AV00126 | 57.79 | 49.37 | 49.63 | 24.96 | 28.22 | 13.57 | 52.26 ± 4.79 | 22.25 ± 7.69 |
| AV00127 | 60.31 | 51.67 | 54.57 | 22.52 | 12.95 | 13.87 | 55.52 ± 4.4 | 16.44 ± 5.28 |
| AV00128 | 14.45 | 19.71 | 8.00 | 14.39 | 2.08 | −5.46 | 14.05 ± 5.87 | 3.67 ± 10.02 |
| AV00129 | 37.12 | 38.30 | 20.18 | 26.01 | 12.46 | −1.20 | 31.87 ± 10.14 | 12.42 ± 13.61 |
| AV00130 | 5.18 | 5.32 | 10.82 | 21.04 | 18.38 | 13.33 | 7.11 ± 3.22 | 17.58 ± 3.92 |
| AV00131 | 30.07 | 31.44 | 38.14 | 8.51 | 25.97 | 23.80 | 33.22 ± 4.32 | 19.43 ± 9.51 |
| AV00132 | 26.46 | 16.87 | 24.53 | 26.67 | −5.93 | 18.47 | 22.62 ± 5.07 | 13.07 ± 16.96 |
| AV00133 | 30.64 | 13.58 | 30.46 | 1.27 | 16.57 | 14.84 | 24.9 ± 9.8 | 10.89 ± 8.38 |
| AV00134 | −1.69 | 23.47 | 3.75 | −10.06 | −11.46 | 2.31 | 8.51 ± 13.24 | −6.4 ± 7.58 |
| AV00135 | −0.25 | 15.11 | 11.55 | −0.35 | −1.05 | −10.59 | 8.8 ± 8.04 | −4 ± 5.72 |
| AV00136 | −5.77 | 2.13 | 5.80 | 10.89 | 14.96 | 2.82 | 0.72 ± 5.91 | 9.56 ± 6.18 |
| AV00137 | 19.35 | 21.06 | 29.49 | 15.89 | 13.70 | 10.16 | 23.3 ± 5.43 | 13.25 ± 2.89 |
| AV00138 | 48.10 | 46.49 | 44.67 | 19.50 | 13.68 | 19.53 | 46.42 ± 1.71 | 17.57 ± 3.37 |
| AV00139 | 61.67 | 63.90 | 49.21 | 26.21 | 27.72 | 25.37 | 58.26 ± 7.92 | 26.44 ± 1.19 |
| AV00140 | 34.63 | 29.60 | 28.49 | 16.87 | 25.81 | 23.73 | 30.91 ± 3.27 | 22.14 ± 4.68 |
| AV00141 | 37.26 | 40.08 | 34.19 | 24.02 | 10.49 | 7.39 | 37.17 ± 2.95 | 13.96 ± 8.84 |
| AV00142 | 31.56 | 38.44 | 47.32 | 32.86 | 30.04 | 7.52 | 39.11 ± 7.9 | 23.47 ± 13.89 |
| AV00143 | 16.55 | 5.61 | 25.08 | 2.56 | 1.09 | 14.66 | 15.75 ± 9.76 | 6.1 ± 7.44 |
| AV00144 | 34.87 | 36.47 | 22.09 | −1.37 | 23.23 | −2.57 | 31.14 ± 7.88 | 6.43 ± 14.56 |
| AV00145 | 12.58 | 20.84 | 23.93 | 6.89 | 17.73 | 18.90 | 19.12 ± 5.87 | 14.51 ± 6.62 |
| AV00146 | 17.23 | 2.18 | 35.70 | 9.75 | −14.56 | 9.86 | 18.37 ± 16.79 | 1.68 ± 14.07 |
| AV00147 | 37.07 | 29.40 | 30.89 | −12.86 | 12.78 | 3.28 | 32.46 ± 4.07 | 1.07 ± 12.96 |
| AV00148 | 18.91 | 24.27 | 20.66 | 15.39 | −0.29 | 10.06 | 21.28 ± 2.74 | 8.38 ± 7.97 |
| AV00149 | 34.67 | 35.51 | 42.00 | 17.63 | 14.16 | 0.91 | 37.39 ± 4.01 | 10.9 ± 8.83 |
| AV00150 | 23.64 | 32.49 | 39.08 | 8.26 | 27.22 | 4.10 | 31.74 ± 7.75 | 13.2 ± 12.32 |
| AV00151 | 29.63 | 18.23 | 33.40 | −11.53 | 4.85 | 3.28 | 27.08 ± 7.9 | −1.14 ± 9.04 |
| AV00152 | 7.14 | 8.73 | 11.52 | −10.32 | 7.00 | 19.93 | 9.13 ± 2.22 | 5.54 ± 15.18 |
| AV00153 | 15.18 | 17.10 | 11.01 | −2.68 | 18.17 | 8.92 | 14.43 ± 3.11 | 8.14 ± 10.45 |
| AV00154 | 3.76 | 8.40 | −2.82 | 3.55 | 11.84 | 23.76 | 3.11 ± 5.64 | 13.05 ± 10.16 |
| AV00155 | 40.39 | 35.99 | 24.94 | 20.29 | 4.72 | 8.22 | 33.78 ± 7.96 | 11.08 ± 8.17 |
| AV00156 | 48.03 | 53.87 | 44.46 | 19.65 | 4.24 | 0.54 | 48.79 ± 4.75 | 8.14 ± 10.14 |
| AV00157 | 5.83 | 0.73 | 14.54 | 8.81 | 0.28 | −5.20 | 7.03 ± 6.98 | 1.29 ± 7.06 |
| AV00158 | −25.20 | −13.67 | −10.50 | −19.74 | −27.38 | −8.06 | −16.46 ± 7.74 | −18.39 ± 9.73 |
| AV00159 | −0.49 | −1.23 | 3.57 | 12.19 | 7.24 | −8.92 | 0.62 ± 2.59 | 3.5 ± 11.04 |
| AV00160 | −14.61 | −0.51 | −16.26 | −13.95 | 4.74 | −36.43 | −10.46 ± 8.65 | −15.21 ± 20.61 |
| AV00161 | 37.16 | 23.76 | 20.23 | 0.03 | 3.95 | 4.53 | 27.05 ± 8.94 | 2.84 ± 2.45 |
| AV00162 | 15.17 | 30.06 | 26.53 | 1.97 | 4.32 | 9.94 | 23.92 ± 7.78 | 5.41 ± 4.1 |
| AV00163 | 26.51 | 6.32 | 4.45 | 3.68 | −6.42 | −0.56 | 12.43 ± 12.23 | −1.1 ± 5.08 |
| AV00164 | 12.92 | 3.15 | 0.52 | 4.68 | −0.72 | −5.31 | 5.53 ± 6.54 | −0.45 ± 5 |
| AV00165 | 8.82 | 27.01 | −8.40 | 6.07 | −1.25 | −4.54 | 9.14 ± 17.71 | 0.09 ± 5.43 |
| AV00166 | −0.92 | −11.91 | 4.33 | −1.21 | 5.41 | 7.70 | −2.83 ± 8.29 | 3.97 ± 4.63 |
| AV00167 | 38.80 | 26.25 | 13.39 | 16.98 | 9.31 | 1.68 | 26.14 ± 12.7 | 9.32 ± 7.65 |
| AV00168 | 50.66 | 44.21 | 42.59 | −3.68 | 18.09 | 24.86 | 45.82 ± 4.27 | 13.09 ± 14.91 |
| AV00169 | −4.71 | 1.84 | −6.06 | −7.67 | 0.35 | −1.47 | −2.97 ± 4.23 | −2.93 ± 4.2 |
| AV00170 | −26.60 | −24.07 | −18.79 | −25.70 | 8.71 | 12.90 | −23.15 ± 3.98 | −1.36 ± 21.18 |
| AV00171 | −9.86 | 0.81 | 8.35 | −18.50 | −8.10 | −28.33 | −0.23 ± 9.15 | −18.31 ± 10.11 |
| AV00172 | 21.83 | 29.14 | 21.85 | 14.74 | 8.44 | −2.30 | 24.28 ± 4.21 | 6.96 ± 8.62 |
| AV00173 | 18.80 | 11.14 | 9.85 | 0.53 | 4.28 | 2.49 | 13.26 ± 4.84 | 2.44 ± 1.87 |
| AV00174 | 20.20 | 3.18 | 27.08 | 0.74 | 11.08 | −3.33 | 16.82 ± 12.3 | 2.83 ± 7.43 |
| AV00175 | 17.95 | 12.15 | 13.36 | 12.15 | 17.57 | −0.95 | 14.49 ± 3.06 | 9.59 ± 9.52 |
| AV00176 | 44.25 | 48.81 | 43.11 | 7.78 | 25.40 | 20.96 | 45.39 ± 3.02 | 18.05 ± 9.16 |
| AV00177 | 23.93 | 36.34 | 27.92 | 23.12 | −5.39 | 9.75 | 29.4 ± 6.34 | 9.16 ± 14.26 |
| AV00178 | 0.00 | 6.42 | −9.82 | 9.86 | 18.29 | 4.30 | −1.13 ± 8.18 | 10.82 ± 7.04 |
| AV00179 | 10.09 | 0.83 | 15.90 | 17.67 | 0.27 | −3.09 | 8.94 ± 7.6 | 4.95 ± 11.15 |
| AV00180 | 23.19 | 31.99 | 32.14 | 1.35 | −1.15 | 10.37 | 29.11 ± 5.12 | 3.52 ± 6.06 |
| AV00181 | −2.78 | −11.51 | −6.05 | 3.14 | 3.68 | 17.42 | −6.78 ± 4.41 | 8.08 ± 8.1 |
| AV00182 | −42.00 | −13.22 | −16.52 | −18.26 | −6.23 | −5.03 | −23.91 ± 15.75 | −9.84 ± 7.32 |
| AV00183 | −6.80 | 7.22 | −13.19 | −5.60 | −3.55 | −10.33 | −4.26 ± 10.44 | −6.49 ± 3.48 |
| AV00184 | −19.87 | −3.42 | 2.48 | −11.82 | 5.71 | −5.44 | −6.93 ± 11.58 | −3.85 ± 8.87 |
| AV00185 | 7.87 | 12.20 | 6.68 | 7.79 | 20.31 | 8.12 | 8.92 ± 2.91 | 12.07 ± 7.14 |
| AV00186 | 16.29 | 14.22 | 8.71 | 4.34 | 1.60 | 19.64 | 13.07 ± 3.92 | 8.53 ± 9.72 |
| AV00187 | 27.62 | 23.09 | 32.62 | −0.06 | −7.08 | −2.73 | 27.78 ± 4.77 | −3.29 ± 3.55 |
| AV00188 | 25.32 | 11.82 | 9.96 | 6.89 | 2.45 | 5.45 | 15.7 ± 8.39 | 4.93 ± 2.26 |
| AV00189 | 36.90 | 25.16 | 27.89 | 9.72 | 26.25 | 13.84 | 29.98 ± 6.14 | 16.6 ± 8.61 |
| AV00190 | −19.33 | −3.61 | 17.31 | 2.40 | 13.23 | 6.97 | −1.88 ± 18.38 | 7.53 ± 5.44 |
| AV00191 | −8.17 | 2.85 | −14.56 | 7.21 | 6.42 | 4.45 | −6.63 ± 8.81 | 6.03 ± 1.42 |
| AV00192 | −15.69 | 7.96 | 7.26 | 5.66 | 16.15 | 10.03 | −0.16 ± 13.46 | 10.61 ± 5.27 |
| AV00193 | −4.92 | 15.62 | −2.27 | 2.99 | −3.76 | 3.73 | 2.81 ± 11.17 | 0.98 ± 4.13 |
| AV00194 | −33.87 | −19.43 | −28.60 | −43.88 | 20.84 | −7.36 | −27.3 ± 7.31 | −24.03 ± 18.47 |
| AV00195 | 0.20 | 18.94 | 13.75 | −12.53 | −16.30 | −4.18 | 10.96 ± 9.68 | −11 ± 6.21 |
| AV00196 | 13.36 | 2.83 | 9.10 | −11.87 | 1.83 | −11.47 | 8.43 ± 5.3 | −7.17 ± 7.8 |
| AV00197 | 16.31 | 10.80 | 17.97 | 15.72 | 3.62 | −12.32 | 15.03 ± 3.75 | 2.34 ± 14.07 |
| AV00198 | 9.66 | −9.58 | 13.15 | 11.57 | 25.56 | 9.67 | 4.41 ± 12.24 | 15.6 ± 8.67 |
| AV00199 | 1.16 | 4.54 | 7.07 | 18.16 | −2.74 | 13.05 | 4.26 ± 2.97 | 9.49 ± 10.9 |
| AV00200 | 0.38 | 17.21 | 5.05 | 11.62 | −19.20 | −21.34 | 7.55 ± 8.69 | −9.64 ± 18.44 |
| AV00201 | 13.46 | 3.72 | −1.04 | −2.48 | −6.79 | 13.82 | 5.38 ± 7.39 | 1.51 ± 10.87 |
| AV00202 | 17.81 | 27.79 | 23.96 | 24.33 | 16.06 | 14.70 | 23.19 ± 5.04 | 18.36 ± 5.22 |
| AV00203 | 23.36 | 24.72 | 14.70 | 12.28 | 0.46 | 11.09 | 20.93 ± 5.44 | 7.94 ± 6.51 |
| AV00204 | 9.50 | 27.29 | 11.48 | −0.63 | 11.79 | −7.73 | 16.09 ± 9.75 | 1.14 ± 9.88 |
| AV00205 | 5.30 | 6.46 | 11.40 | −3.32 | 4.30 | −15.98 | 7.72 ± 3.24 | −5 ± 10.24 |

### Example 7. In Vivo Test of LPA siRNA Duplex

[0171] To evaluate the in vivo activity of LPA siRNAs, mice infected with AAV encoding human LPA and luciferase gene were used (4 mice per group). Female C57BL/6J mice were infected 14 days before siRNA administration by intravenous injection of a stock of 2×10\hat{ }11 viral particle of adeno-associated virus 8 (AAV8) vector encoding human LPA and luciferase gene. On day 0, mice were subcutaneously injected with a single dose of 6 mg/kg of LPA siRNA agent or PBS. Blood samples were collected on day 0, before siRNA administration and at the end of day 7. Luciferase activity was measured. The percentage of knockdown was calculated by comparing the luciferase activity of blood samples from the siRNA-treated group before administration and the luciferase activity of blood samples collected at the end of day 7 and performing normalization based on changes in luciferase activity in serum samples from the PBS-treated group. As a result, as shown in Table 5, the duplex AD # used is derived from the sequence corresponding to that shown in Table 3.

Table 5 provides the experimental results from in vivo studies of inhibitory effect on LPA expression using a plurality of LPA_RNAi agents at a single dose of 6 mpk. On day 7, the remaining luciferase activity relative to day 0 was normalized to the change in the PBS-treated group (mean±SD)

| Duplex | On day 7, the luciferase activity |
|---|---|
| AD# | relative to PBS (mean ± SD) |
| AD00433 | 0.71 ± 0.23 |
| AD00434 | 0.66 ± 0.33 |
| AD00438 | 0.69 ± 0.22 |
| AD00436 | 0.22 ± 0.07 |
| AD00441 | 0.54 ± 0.08 |

### Example 8. In Vivo Test of LPA siRNA Duplex

[0172] To evaluate the in vivo activity of LPA siRNAs, mice infected with AAV encoding human LPA and luciferase gene were used (4 mice per group). Female C57BL/6J mice were infected 14 days before siRNA administration by intravenous injection of a stock of 2×10\hat{ }11 viral particle of adeno-associated virus 8 (AAV8) vector encoding human LPA and luciferase gene. On day 0, mice were subcutaneously injected with a single dose of 6 mg/kg of LPA siRNA agent or PBS. Blood samples were collected before siRNA administration on day 0, at the end of day 7 and day 14. Luciferase activity was measured and the percentage of knockdown was calculated by comparing the luciferase activity of blood samples from the siRNA-treated group before administration and the luciferase activity of blood samples collected on day 7 and day 14 and performing normalization based on changes in luciferase activity in serum samples from the PBS-treated group. The knockdown (retention) percentage of human LPA mRNA levels (determined by qPCR) in the liver of mice on day 14 between the siRNA-treated group and the PBS-treated group was compared, and the results are shown in Table 6. The duplex AD # used was derived from the sequences corresponding to those shown in Table 3.

Table 6 provides the experimental results from in vivo studies of inhibition of LPA expression using a plurality of LPA_RNAi agents at a single dose of 6 mpk.

| | | | The percentage |
|---|---|---|---|
| | On day 7, the | On day 14, the | of human LPA |
| | luciferase | luciferase | mRNA retained |
| | activity | activity | in mouse liver |
| | relative | relative | was detected |
| Duplex | to PBS | to PBS | by qPCR |
| AD# | (mean ± SD) | (mean ± SD) | (mean ± SD) |
| AD00474 | 0.36 ± 0.05 | 0.31 ± 0.18 | 0.36 ± 0.24 |
| AD00475 | 0.53 ± 0.56 | 0.36 ± 0.27 | 0.14 ± 0.1 |
| AD00476 | 0.73 ± 0.46 | 0.38 ± 0.1 | 0.17 ± 0.08 |
| AD00477 | 1.11 ± 0.3 | 0.64 ± 0.14 | 0.82 ± 0.14 |
| AD00478 | 0.73 ± 0.39 | 0.61 ± 0.17 | 0.38 ± 0.31 |
| AD00479 | 0.48 ± 0.26 | 0.48 ± 0.07 | 0.18 ± 0.11 |
| AD00480 | 0.31 ± 0.18 | 0.22 ± 0.14 | 0.14 ± 0.12 |
| AD00481 | 0.93 ± 0.35 | 0.72 ± 0.32 | 0.57 ± 0.12 |
| AD00482 | 0.47 ± 0.37 | 0.4 ± 0.33 | 0.15 ± 0.08 |
| AD00474-1 | 0.48 ± 0.1 | 0.3 ± 0.1 | 0.33 ± 0.4 |
| AD00478-1 | 0.48 ± 0.09 | 0.32 ± 0.05 | 0.32 ± 0.1 |
| AD00482-1 | 0.4 ± 0.1 | 0.34 ± 0.07 | 0.18 ± 0.13 |
| AD00483 | 0.49 ± 0.16 | 0.6 ± 0.21 | 0.65 ± 0.4 |
| AD00484 | 0.83 ± 0.11 | 1.08 ± 0.35 | 0.77 ± 0.32 |
| AD00485 | 0.41 ± 0.09 | 0.54 ± 0.14 | 0.49 ± 0.16 |
| AD00486 | 0.4 ± 0.19 | 0.69 ± 0.09 | NA |
| AD00487 | 0.44 ± 0.11 | 0.83 ± 0.18 | NA |
| AD00484-1 | 0.51 ± 0.16 | 0.64 ± 0.35 | 0.45 ± 0.49 |
| AD00342 | 0.6 ± 0.18 | 0.58 ± 0.13 | 0.59 ± 0.21 |

NA means not detected.

### Example 9. In Vivo Test of LPA siRNA Duplex

[0173] To evaluate the in vivo activity of LPA siRNAs, mice infected with AAV encoding human LPA and luciferase gene were used (4 mice per group). Female C57BL/6J mice were infected 7 days before siRNA administration by intravenous injection of a stock of 2×10 \hat{ }11 viral particle of adeno-associated virus 8 (AAV8) vector encoding human LPA and luciferase gene. On day 0, mice were subcutaneously injected with a single dose of 3 mg/kg, 6 mg/kg and 10 mg/kg of LPA siRNA agent or PBS, respectively. Mice were sacrificed at termination. The knockdown (retention) percentage of human LPA mRNA levels (determined by qPCR) in the liver of mice on day 14 between the siRNA-treated group and the PBS-treated group was compared, and the results are shown in Table 7. The duplex AD # used was derived from the sequences corresponding to those shown in Table 3.

Table 7 provides the experimental results from in vivo studies of inhibition of LPA expression using a plurality of LPA_RNAi agents at a single dose of 3 mpk, 6 mpk, and 10 mpk, respectively.

| | The percentage of human LPA mRNA retained in | | |
|---|---|---|---|
| Duplex | mouse liver was detected by qPCR (mean ± SD) | | Dose |
| AD# | Mean | SD | (mg/kg) |
| AD00436 | 0.31 | 0.07 | 3 |
| | 0.29 | 0.07 | 6 |
| | 0.29 | 0.20 | 10 |
| AD00337 | 0.59 | 0.23 | 3 |
| | 0.72 | 0.39 | 6 |
| | 0.46 | 0.23 | 10 |

### Example 10. In Vivo Test of LPA siRNA Duplex

[0174] To evaluate the in vivo activity of LPA siRNAs, mice infected with AAV encoding human LPA and luciferase gene were used (4 mice per group). Female C57BL/6J mice were infected 7 days before siRNA administration by intravenous injection of a stock of 2×10 \hat{ }11 viral particle of adeno-associated virus 8 (AAV8) vector encoding human LPA and luciferase gene. On day 0, mice were subcutaneously injected with a single dose of 2 mg/kg or 6 mg/kg of LPA siRNA agent or PBS. Blood samples were collected on day 0, before siRNA administration and at the end of day 7, 14 and 21, respectively. Luciferase activity was measured. The percentage of knockdown was calculated by comparing the luciferase activity of blood samples from the siRNA-treated group before administration and the luciferase activity of blood samples collected at the end of day 7, 14 and 21 and performing normalization based on changes in luciferase activity in serum samples from the PBS-treated group. As a result, as shown in Table 8, the duplex AD # used is derived from the sequence corresponding to that shown in Table 3.

Table 8 provides the experimental results from in vivo studies of inhibition of LPA expression using a plurality of LPA_RNAi agents at a single dose of 2 and 6 mpk, and on days 7, 14 and 21, the remaining luciferase activity relative to day 0 was normalized to the change in the PBS-treated group (mean±SD).

| | The luciferase activity | | | |
|---|---|---|---|---|
| Duplex | relative to PBS (mean ± SD) | | | Dose |
| AD# | Day 7 | Day 14 | Day 21 | (mg/kg) |
| PBS | 1.00 ± 0.38 | 1.00 ± 0.23 | 1.00 ± 0.37 | |
| AD00436 | 0.53 ± 0.36 | 0.45 ± 0.09 | 0.40 ± 0.29 | 2 |
| AD00436 | 0.34 ± 0.07 | 0.30 ± 0.06 | 0.31 ± 0.11 | 6 |
| AD00474 | 0.98 ± 0.66 | 0.52 ± 0.20 | 0.66 ± 0.39 | 2 |
| AD00474 | 0.36 ± 0.16 | 0.19 ± 0.10 | 0.21 ± 0.07 | 6 |
| AD00475 | 0.48 ± 0.21 | 0.34 ± 0.17 | 0.34 ± 0.21 | 2 |
| AD00475 | 0.47 ± 0.20 | 0.15 ± 0.03 | 0.18 ± 0.12 | 6 |
| AD00476 | 0.75 ± 0.33 | 0.38 ± 0.13 | 0.52 ± 0.26 | 2 |
| AD00476 | 0.65 ± 0.04 | 0.36 ± 0.14 | 0.29 ± 0.16 | 6 |
| AD00479 | 0.53 ± 0.34 | 0.41 ± 0.19 | 0.53 ± 0.25 | 2 |
| AD00479 | 0.41 ± 0.17 | 0.34 ± 0.08 | 0.31 ± 0.17 | 6 |
| AD00480 | 0.35 ± 0.15 | 0.23 ± 0.02 | 0.24 ± 0.13 | 2 |
| AD00480 | 0.28 ± 0.07 | 0.15 ± 0.05 | 0.24 ± 0.08 | 6 |
| AD00482 | 0.71 ± 0.37 | 0.50 ± 0.13 | 0.56 ± 0.27 | 2 |
| AD00482 | 0.41 ± 0.33 | 0.27 ± 0.08 | 0.31 ± 0.08 | 6 |
| AD00474-1 | 0.42 ± 0.11 | 0.35 ± 0.11 | 0.29 ± 0.04 | 6 |
| AD00478-1 | 0.54 ± 0.15 | 0.28 ± 0.08 | 0.37 ± 0.01 | 6 |
| AD00482-1 | 0.24 ± 0.15 | 0.28 ± 0.14 | 0.15 ± 0.04 | 6 |
| AD00337 | 0.41 ± 0.19 | 0.62 ± 0.21 | 0.74 ± 0.16 | 2 |
| AD00337 | 0.47 ± 0.21 | 0.45 ± 0.33 | 0.37 ± 0.19 | 6 |
| AD00150 | 0.83 ± 0.35 | 0.74 ± 0.26 | 0.58 ± 0.10 | 2 |
| AD00150 | 0.41 ± 0.20 | 0.25 ± 0.09 | 0.28 ± 0.24 | 6 |

### Example 11. In Vivo Test of LPA siRNA Duplex

[0175] To evaluate the in vivo activity of LPA siRNA, male cynomolgus monkeys (13-22 years old, weighing 7-9 kg) were recruited in this study, with 3 animals in each group. Each animal was subcutaneously injected with 2 mg/kg of the test article. The test articles used corresponded to the compounds shown in Table 3 (AD00377-1, AD00436-1, AD00480, AD00480-1, AD00480-2, and AD00474-2).

After fasting overnight, blood collection was performed on days −14 (before administration), −7 (before administration), 1 (before administration) and days 8, 15, 22, 29, 43, 50, 57, 64, 71, 78, 85, 92 and 99 after administration. The collected blood samples were left to clot at room temperature for at least 30 min and then centrifuged at 3500 rpm for 10 min at 4° C. The collected serum (approximately 1.0 mL) was transferred to two pre-labeled polypropylene screw-capped vials (0.5 ml/vial, one for ELISA assay and the other spare) and stored in a refrigerator at −80° C. until testing. LPA remaining percentage (normalized to the mean of day −14 (before administration), −7 (before administration), and 1 (before administration), pre-administration of siRNA) is shown in FIG. 1.

### Example 12. In Vivo Test of LPA siRNA Duplex

[0176] To evaluate the in vivo activity of LPA siRNA, male cynomolgus monkeys (2-6 years old, weighing 2-6 kg) were recruited in this study, with 4 animals in each group. Each animal was subcutaneously injected with saline or 2 mg/kg of the AD00480-8 test product. The test product AD00480-8 used corresponds to the compound shown in Table 3. After fasting overnight, blood collection was performed on days −14 (before administration), 0 (before administration) and days 7, 14 and 21 after administration. The collected blood samples were left to clot at room temperature for at least 30 min and then centrifuged at 3500 rpm for 10 min at 4° C. The collected serum (approximately 1.0 mL) was transferred to two pre-labeled polypropylene screw-capped vials (0.5 ml/vial, one for ELISA assay and the other spare) and stored in a refrigerator at −80° C. until testing. LPA remaining percentage (normalized to the mean of day −14 (before administration), and 0 (before administration), pre-administration of siRNA) is shown in FIG. 2.

### Example 13. In Vitro Screening of LPA siRNA Duplexes Using Huh7 Cells and Dual Fluorescent Reporter Gene Vector

[0177] Huh7 cells were adjusted to the appropriate density and then seeded into 96-well plates. According to the manufacturer's recommendations, at the same time as inoculation, the dual fluorescent reporter gene vector psciCHECK2 containing the target gene was co-transfected with siRNA into Huh7 cells using Lipofectamine RNAiMax (Invitrogen-13778-150). Cells were transfected with test siRNAs or control siRNAs. SiRNAs were tested in triplicate at two concentrations (0.1 nM and 1.0 nM), and 48 h after transfection, Dual-Glo® Luciferase Assay Reagent was added to detect fluorescence values. The ratio of Renilla luminescence to firefly luminescence was calculated and normalized based on the ratio of control siRNA-treated samples to calculate knockdown efficiency. As a result, as shown in Table 9, the duplex AV # used is derived from the sequence corresponding to that shown in Table 2.

Table 9 provides experimental results from in vitro studies of inhibition of LPA expression using a plurality of LPA RNAi agents.

% inhibition
(MEAN ± SD)

| Compound | 1 nM | 0.1 nM |
|---|---|---|
| AV01867 | 46.80 ± 4.94 | 20.67 ± 6.22 |
| AV01868 | 49.97 ± 3.00 | 21.34 ± 5.62 |
| AV01873 | 22.50 ± 6.76 | 6.04 ± 3.83 |
| AV01874 | 20.31 ± 1.71 | 1.22 ± 8.37 |
| AV01875 | 27.87 ± 1.62 | −5.41 ± 4.13 |
| AV01876 | 25.57 ± 6.31 | −7.12 ± 10.15 |
| AV01877 | 32.85 ± 3.12 | 7.02 ± 1.04 |
| AV01878 | 37.56 ± 0.72 | 2.90 ± 8.20 |
| AV01879 | 38.63 ± 0.47 | 14.23 ± 4.04 |
| AV01880 | 36.24 ± 5.54 | 9.07 ± 11.68 |
| AV01881 | 45.01 ± 3.67 | 19.69 ± 5.00 |
| AV01882 | 35.40 ± 2.43 | 7.05 ± 4.97 |
| AV01883 | 44.89 ± 0.46 | 13.21 ± 3.78 |
| AV01884 | 26.17 ± 1.54 | 12.79 ± 1.48 |
| AV01885 | 25.52 ± 7.87 | 10.49 ± 2.89 |
| AV01892 | 53.83 ± 2.87 | 25.26 ± 5.37 |
| AV01893 | 36.28 ± 2.27 | 6.31 ± 2.85 |
| AV01894 | 35.36 ± 3.10 | 11.69 ± 5.37 |
| AV01895 | 45.05 ± 3.74 | 23.56 ± 4.75 |
| AV01896 | 40.16 ± 7.76 | 17.86 ± 5.24 |
| AV01897 | 45.63 ± 7.21 | 19.64 ± 4.51 |
| AV01898 | 49.62 ± 9.10 | 16.53 ± 7.32 |
| AV01899 | 57.70 ± 3.74 | 35.66 ± 2.89 |
| AV01900 | 53.18 ± 2.20 | 30.51 ± 3.16 |
| AV01901 | 44.34 ± 6.20 | 13.45 ± 5.55 |
| AV01904 | 35.60 ± 7.26 | 2.08 ± 11.15 |
| AV01905 | 40.65 ± 4.84 | 15.01 ± 4.32 |
| AV01906 | 44.74 ± 0.90 | 13.56 ± 2.16 |
| AV01907 | 34.73 ± 0.26 | 14.73 ± 1.92 |
| AV01908 | 49.62 ± 7.01 | 31.33 ± 6.37 |
| AV01909 | 47.80 ± 0.70 | 21.96 ± 2.27 |
| AV01910 | 51.88 ± 0.67 | 20.22 ± 6.09 |
| AV01911 | 35.42 ± 2.80 | 11.40 ± 6.02 |
| AV01912 | 49.53 ± 7.27 | 20.62 ± 3.24 |
| AV01913 | 47.11 ± 0.39 | 17.63 ± 1.31 |
| AV01914 | 45.76 ± 1.63 | 22.16 ± 4.50 |
| AV01915 | 48.93 ± 1.28 | 23.82 ± 3.60 |
| AV01916 | 32.73 ± 3.88 | −3.38 ± 3.58 |
| AV01917 | 23.54 ± 4.29 | −0.21 ± 6.61 |
| AV01921 | 43.98 ± 3.11 | 10.24 ± 2.51 |
| AV01922 | 48.03 ± 3.11 | 16.51 ± 1.01 |
| AV01923 | 50.53 ± 4.02 | 30.41 ± 4.87 |
| AV01924 | 57.72 ± 3.14 | 34.72 ± 1.99 |
| AV01925 | 49.37 ± 3.12 | 28.89 ± 5.77 |
| AV01926 | 57.83 ± 4.08 | 38.92 ± 1.85 |
| AV01927 | 32.41 ± 9.25 | 16.81 ± 3.52 |
| AV01928 | 58.81 ± 3.31 | 40.57 ± 2.02 |
| AV01929 | 58.05 ± 4.18 | 33.99 ± 5.29 |
| AV01930 | 58.89 ± 3.50 | 35.67 ± 3.53 |
| AV01931 | 49.37 ± 2.20 | 19.50 ± 3.95 |
| AV01932 | 30.69 ± 0.79 | 4.38 ± 5.60 |
| AV01934 | 34.14 ± 3.07 | 13.58 ± 4.37 |
| AV01935 | 44.01 ± 2.35 | 16.32 ± 4.15 |
| AV01936 | 50.96 ± 4.79 | 24.30 ± 9.44 |
| AV01937 | 48.58 ± 2.39 | 14.95 ± 3.03 |
| AV01938 | 32.80 ± 16.53 | 4.91 ± 7.45 |
| AV01939 | 53.10 ± 3.18 | 27.01 ± 2.43 |
| AV01940 | 50.61 ± 0.41 | 25.92 ± 2.96 |
| AV01941 | 60.07 ± 2.85 | 35.89 ± 2.87 |
| AV01942 | 53.04 ± 2.48 | 25.26 ± 6.30 |
| AV01943 | 54.83 ± 2.70 | 29.55 ± 3.91 |
| AV01944 | 53.74 ± 3.75 | 23.32 ± 1.22 |
| AV01945 | 56.37 ± 2.30 | 25.57 ± 1.53 |
| AV01946 | 54.40 ± 1.99 | 27.22 ± 1.92 |
| AV01947 | 46.31 ± 3.73 | 10.99 ± 5.81 |
| AV01948 | 34.03 ± 5.43 | 13.50 ± 5.30 |
| AV01949 | 29.76 ± 2.51 | 7.70 ± 1.98 |
| AV01952 | 49.08 ± 1.47 | 27.95 ± 4.70 |
| AV01953 | 46.02 ± 3.99 | 21.19 ± 4.05 |
| AV01954 | 48.61 ± 1.50 | 25.36 ± 2.97 |
| AV01955 | 53.20 ± 2.87 | 30.14 ± 2.11 |
| AV01956 | 53.62 ± 4.74 | 35.02 ± 4.48 |
| AV01957 | 54.16 ± 3.13 | 13.92 ± 6.54 |
| AV01958 | 57.25 ± 3.76 | 28.45 ± 5.01 |
| AV01959 | 57.76 ± 2.66 | 35.48 ± 2.07 |
| AV00124 | 60.09 ± 1.74 | 33.15 ± 2.78 |
| AV00142 | 56.94 ± 1.21 | 27.73 ± 1.55 |

### Equivalent

[0178] Although several embodiments of the present invention have been described and illustrated herein, it is readily understood by those of ordinary skill in the art that a variety of other means and/or structures for performing the functions described herein and/or obtaining results and/or one or more advantages, and each of these variations and/or modifications, are considered to be within the scope of the present invention. More generally, it will be readily understood by those skilled in the art that all parameters, sizes, materials and configurations described herein are exemplary and that the actual parameters, sizes, materials and/or configurations will depend on the particular application in which the teachings of the present invention are used. Those skilled in the art will recognize or be able to determine many equivalents of the particular embodiments of the present invention described herein using only conventional experiments. It should therefore be understood that the foregoing embodiments are presented by way of example only and fall within the scope of the appended claims and their equivalents, and that the present invention may be implemented in a manner different from that specifically described and claimed for protection. The present invention is directed to each of the individual features, systems, articles, materials and/or methods described herein. Further, any combination of two or more such features, systems, articles, materials and/or methods, if such features, systems, articles, materials and/or methods are not contradictory to each other, is also included within the scope of the present invention.

[0179] All definitions as defined and used herein shall be understood as referring to dictionary definitions, definitions in files incorporated by reference, and/or the ordinary meanings of defined terms.

[0180] Where quantitative limitations are not used in the specification and claims, they are to be understood as “at least one” unless expressly stated to the contrary.

[0181] The phrases “and/or” as used in the specification and claims are to be understood as denoting “one or both” of the elements so combined, i.e. such elements appear in combination in some cases and separately in others. In addition to elements specifically identified by “and/or”, other elements may optionally exist, whether related or not to those specifically identified elements, unless the contrary is clearly stated.

[0182] All references, patents and patent applications and publications cited or referenced in the present application are incorporated herein by reference in their entirety.

The application's sequence listing, which the Patent Office published only in electronic form, follows.

SEQUENCE LISTING (937 sequences)

SEQ ID NO: 1 - RNA, 6431 nt, Homo sapiens
  source 1..6431: mol_type = mRNA
gtaagtcaacaatgtcctgggattgggacacactttctgggcactgctggccagtcccaaaatggaacataaggaagtggttcttctacttcttttatttctgaaatcagcagcacctgagcaaagccatgtggtccaggattgctaccatggtgatggacagagttatcgaggcacgtactccaccactgtcacaggaaggacctgccaagcttggtcatctatgacaccacatcaacataataggaccacagaaaactacccaaatgctggcttgatcatgaactactgcaggaatccagatgctgtggcagctccttattgttatacgagggatcccggtgtcaggtgggagtactgcaacctgacgcaatgctcagacgcagaagggactgccgtcgcgcctccgactgttaccccggttccaagcctagaggctccttccgaacaagcaccgactgagcaaaggcctggggtgcaggagtgctaccatggtaatggacagagttatcgaggcacatactccaccactgtcacaggaagaacctgccaagcttggtcatctatgacaccacactcgcatagtcggaccccagaatactacccaaatgctggcttgatcatgaactactgcaggaatccagatgctgtggcagctccttattgttatacgagggatcccggtgtcaggtgggagtactgcaacctgacgcaatgctcagacgcagaagggactgccgtcgcgcctccgactgttaccccggttccaagcctagaggctccttccgaacaagcaccgactgagcaaaggcctggggtgcaggagtgctaccatggtaatggacagagttatcgaggcacatactccaccactgtcacaggaagaacctgccaagcttggtcatctatgacaccacactcgcatagtcggaccccagaatactacccaaatgctggcttgatcatgaactactgcaggaatccagatgctgtggcagctccttattgttatacgagggatcccggtgtcaggtgggagtactgcaacctgacgcaatgctcagacgcagaagggactgccgtcgcgcctccgactgttaccccggttccaagcctagaggctccttccgaacaagcaccgactgagcagaggcctggggtgcaggagtgctaccacggtaatggacagagttatcgaggcacatactccaccactgtcactggaagaacctgccaagcttggtcatctatgacaccacactcgcatagtcggaccccagaatactacccaaatgctggcttgatcatgaactactgcaggaatccagatgctgtggcagctccttattgttatacgagggatcccggtgtcaggtgggagtactgcaacctgacgcaatgctcagacgcagaagggactgccgtcgcgcctccgactgttaccccggttccaagcctagaggctccttccgaacaagcaccgactgagcaaaggcctggggtgcaggagtgctaccatggtaatggacagagttatcgaggcacatactccaccactgtcacaggaagaacctgccaagcttggtcatctatgacaccacactcgcatagtcggaccccagaatactacccaaatgctggcttgatcatgaactactgcaggaatccagatgctgtggcagctccttattgttatacgagggatcccggtgtcaggtgggagtactgcaacctgacgcaatgctcagacgcagaagggactgccgtcgcgcctccgactgttaccccggttccaagcctagaggctccttccgaacaagcaccgactgagcaaaggcctggggtgcaggagtgctaccatggtaatggacagagttatcgaggcacatactccaccactgtcacaggaagaacctgccaagcttggtcatctatgacaccacactcgcatagtcggaccccagaatactacccaaatgctggcttgatcatgaactactgcaggaatccagatgctgtggcagctccttattgttatacgagggatcccggtgtcaggtgggagtactgcaacctgacgcaatgctcagacgcagaagggactgccgtcgcgcctccgactgttaccccggttccaagcctagaggctccttccgaacaagcaccgactgagcaaaggcctggggtgcaggagtgctaccatggtaatggacagagttatcgaggcacatactccaccactgtcacaggaagaacctgccaagcttggtcatctatgacaccacactcgcatagtcggaccccagaatactacccaaatgctggcttgatcatgaactactgcaggaatccagatgctgtggcagctccttattgttatacgagggatcccggtgtcaggtgggagtactgcaacctgacgcaatgctcagacgcagaagggactgccgtcgcgcctccgactgttaccccggttccaagcctagaggctccttccgaacaagcaccgactgagcagaggcctggggtgcaggagtgctaccacggtaatggacagagttatcgaggcacatactccaccactgtcactggaagaacctgccaagcttggtcatctatgacaccacactcgcatagtcggaccccagaatactacccaaatgctggcttgatcatgaactactgcaggaatccagatcctgtggcagccccttattgttatacgagggatcccagtgtcaggtgggagtactgcaacctgacacaatgctcagacgcagaagggactgccgtcgcgcctccaactattaccccgattccaagcctagaggctccttctgaacaagcaccaactgagcaaaggcctggggtgcaggagtgctaccacggaaatggacagagttatcaaggcacatacttcattactgtcacaggaagaacctgccaagcttggtcatctatgacaccacactcgcatagtcggaccccagcatactacccaaatgctggcttgatcaagaactactgccgaaatccagatcctgtggcagccccttggtgttatacaacagatcccagtgtcaggtgggagtactgcaacctgacacgatgctcagatgcagaatggactgccttcgtccctccgaatgttattctggctccaagcctagaggctttttttgaacaagcactgactgaggaaacccccggggtacaggactgctactaccattatggacagagttaccgaggcacatactccaccactgtcacaggaagaacttgccaagcttggtcatctatgacaccacaccagcatagtcggaccccagaaaactacccaaatgctggcctgaccaggaactactgcaggaatccagatgctgagattcgcccttggtgttacaccatggatcccagtgtcaggtgggagtactgcaacctgacacaatgcctggtgacagaatcaagtgtccttgcaactctcacggtggtcccagatccaagcacagaggcttcttctgaagaagcaccaacggagcaaagccccggggtccaggattgctaccatggtgatggacagagttatcgaggctcattctctaccactgtcacaggaaggacatgtcagtcttggtcctctatgacaccacactggcatcagaggacaacagaatattatccaaatggtggcctgaccaggaactactgcaggaatccagatgctgagattagtccttggtgttataccatggatcccaatgtcagatgggagtactgcaacctgacacaatgtccagtgacagaatcaagtgtccttgcgacgtccacggctgtttctgaacaagcaccaacggagcaaagccccacagtccaggactgctaccatggtgatggacagagttatcgaggctcattctccaccactgttacaggaaggacatgtcagtcttggtcctctatgacaccacactggcatcagagaaccacagaatactacccaaatggtggcctgaccaggaactactgcaggaatccagatgctgagattcgcccttggtgttataccatggatcccagtgtcagatgggagtactgcaacctgacgcaatgtccagtgatggaatcaactctcctcacaactcccacggtggtcccagttccaagcacagagcttccttctgaagaagcaccaactgaaaacagcactggggtccaggactgctaccgaggtgatggacagagttatcgaggcacactctccaccactatcacaggaagaacatgtcagtcttggtcgtctatgacaccacattggcatcggaggatcccattatactatccaaatgctggcctgaccaggaactactgcaggaatccagatgctgagattcgcccttggtgttacaccatggatcccagtgtcaggtgggagtactgcaacctgacacgatgtccagtgacagaatcgagtgtcctcacaactcccacagtggccccggttccaagcacagaggctccttctgaacaagcaccacctgagaaaagccctgtggtccaggattgctaccatggtgatggacggagttatcgaggcatatcctccaccactgtcacaggaaggacctgtcaatcttggtcatctatgataccacactggcatcagaggaccccagaaaactacccaaatgctggcctgaccgagaactactgcaggaatccagattctgggaaacaaccctggtgttacacaaccgatccgtgtgtgaggtgggagtactgcaatctgacacaatgctcagaaacagaatcaggtgtcctagagactcccactgttgttccagttccaagcatggaggctcattctgaagcagcaccaactgagcaaacccctgtggtccggcagtgctaccatggtaatggccagagttatcgaggcacattctccaccactgtcacaggaaggacatgtcaatcttggtcatccatgacaccacaccggcatcagaggaccccagaaaactacccaaatgatggcctgacaatgaactactgcaggaatccagatgccgatacaggcccttggtgttttaccatggaccccagcatcaggtgggagtactgcaacctgacgcgatgctcagacacagaagggactgtggtcgctcctccgactgtcatccaggttccaagcctagggcctccttctgaacaagactgtatgtttgggaatgggaaaggataccggggcaagaaggcaaccactgttactgggacgccatgccaggaatgggctgcccaggagccccatagacacagcacgttcattccagggacaaataaatgggcaggtctggaaaaaaattactgccgtaaccctgatggtgacatcaatggtccctggtgctacacaatgaatccaagaaaactttttgactactgtgatatccctctctgtgcatcctcttcatttgattgtgggaagcctcaagtggagccgaagaaatgtcctggaagcattgtaggggggtgtgtggcccacccacattcctggccctggcaagtcagtctcagaacaaggtttggaaagcacttctgtggaggcaccttaatatccccagagtgggtgctgactgctgctcactgcttgaagaagtcctcaaggccttcatcctacaaggtcatcctgggtgcacaccaagaagtgaacctcgaatctcatgttcaggaaatagaagtgtctaggctgttcttggagcccacacaagcagatattgccttgctaaagctaagcaggcctgccgtcatcactgacaaagtaatgccagcttgtctgccatccccagactacatggtcaccgccaggactgaatgttacatcactggctggggagaaacccaaggtacctttgggactggccttctcaaggaagcccagctccttgttattgagaatgaagtgtgcaatcactataagtatatttgtgctgagcatttggccagaggcactgacagttgccagggtgacagtggagggcctctggtttgcttcgagaaggacaaatacattttacaaggagtcacttcttggggtcttggctgtgcacgccccaataagcctggtgtctatgctcgtgtttcaaggtttgttacttggattgagggaatgatgagaaataattaattggacgggagacagagtgaagcatcaacctacttagaagctgaaacgtgggtaaggatttagcatgctggaaataatagacagcaatcaaacgaagacactgttcccagctaccagctatgccaaaccttggcatttttggtatttttgtgtataagcttttaaggtctgactgacaaattctgtattaaggtgtcatagctatgacatttgttaaaaataaactctgcacttattttgatttgaa

SEQ ID NO: 2 - RNA, 21 nt, synthetic construct
  source 1..21: mol_type = other RNA
ctggtccaggattgctaccaa

SEQ ID NO: 3 - RNA, 21 nt, synthetic construct
  source 1..21: mol_type = other RNA
ctgatggacagagttatcgaa

SEQ ID NO: 4 - RNA, 21 nt, synthetic construct
  source 1..21: mol_type = other RNA
catggacagagttatcgagga

SEQ ID NO: 5 - RNA, 21 nt, synthetic construct
  source 1..21: mol_type = other RNA
gcctgccaagcttggtcatca

SEQ ID NO: 6 - RNA, 21 nt, synthetic construct
  source 1..21: mol_type = other RNA
gctgccaagcttggtcatcta

SEQ ID NO: 7 - RNA, 21 nt, synthetic construct
  source 1..21: mol_type = other RNA
cccaagcttggtcatctatga

SEQ ID NO: 8 - RNA, 21 nt, synthetic construct
  source 1..21: mol_type = other RNA
gaagcttggtcatctatgaca

SEQ ID NO: 9 - RNA, 21 nt, synthetic construct
  source 1..21: mol_type = other RNA
gactacccaaatgctggctta

SEQ ID NO: 10 - RNA, 21 nt, synthetic construct
  source 1..21: mol_type = other RNA
gtacccaaatgctggcttgaa

SEQ ID NO: 11 - RNA, 21 nt, synthetic construct
  source 1..21: mol_type = other RNA
gacccaaatgctggcttgata

SEQ ID NO: 12 - RNA, 21 nt, synthetic construct
  source 1..21: mol_type = other RNA
ggctccttattgttatacgaa

SEQ ID NO: 13 - RNA, 21 nt, synthetic construct
  source 1..21: mol_type = other RNA
ggcctagaggctccttccgaa

SEQ ID NO: 14 - RNA, 21 nt, synthetic construct
  source 1..21: mol_type = other RNA
gtagaggctccttccgaacaa

SEQ ID NO: 15 - RNA, 21 nt, synthetic construct
  source 1..21: mol_type = other RNA
gaagcaccgactgagcaaaga

SEQ ID NO: 16 - RNA, 21 nt, synthetic construct
  source 1..21: mol_type = other RNA
cgagtgctaccatggtaatga

SEQ ID NO: 17 - RNA, 21 nt, synthetic construct
  source 1..21: mol_type = other RNA
ggtgctaccatggtaatggaa

SEQ ID NO: 18 - RNA, 21 nt, synthetic construct
  source 1..21: mol_type = other RNA
gaccatggtaatggacagaga

SEQ ID NO: 19 - RNA, 21 nt, synthetic construct
  source 1..21: mol_type = other RNA
gtggtaatggacagagttata

SEQ ID NO: 20 - RNA, 21 nt, synthetic construct
  source 1..21: mol_type = other RNA
gggtaatggacagagttatca

SEQ ID NO: 21 - RNA, 21 nt, synthetic construct
  source 1..21: mol_type = other RNA
ctaatggacagagttatcgaa

SEQ ID NO: 22 - RNA, 21 nt, synthetic construct
  source 1..21: mol_type = other RNA
gagagttatcgaggcacataa

SEQ ID NO: 23 - RNA, 21 nt, synthetic construct
  source 1..21: mol_type = other RNA
cagttatcgaggcacatacta

SEQ ID NO: 24 - RNA, 21 nt, synthetic construct
  source 1..21: mol_type = other RNA
gaccacggtaatggacagaga

SEQ ID NO: 25 - RNA, 21 nt, synthetic construct
  source 1..21: mol_type = other RNA
gactgcaggaatccagatcca

SEQ ID NO: 26 - RNA, 21 nt, synthetic construct
  source 1..21: mol_type = other RNA
gggcagccccttattgttata

SEQ ID NO: 27 - RNA, 21 nt, synthetic construct
  source 1..21: mol_type = other RNA
gagccccttattgttatacga

SEQ ID NO: 28 - RNA, 21 nt, synthetic construct
  source 1..21: mol_type = other RNA
gcagtgtcaggtgggagtaca

SEQ ID NO: 29 - RNA, 21 nt, synthetic construct
  source 1..21: mol_type = other RNA
ctactgcaacctgacacaata

SEQ ID NO: 30 - RNA, 21 nt, synthetic construct
  source 1..21: mol_type = other RNA
ggacacaatgctcagacgcaa

SEQ ID NO: 31 - RNA, 21 nt, synthetic construct
  source 1..21: mol_type = other RNA
gtagaggctccttctgaacaa

SEQ ID NO: 32 - RNA, 21 nt, synthetic construct
  source 1..21: mol_type = other RNA
caggctccttctgaacaagca

SEQ ID NO: 33 - RNA, 21 nt, synthetic construct
  source 1..21: mol_type = other RNA
gaagcaccaactgagcaaaga

SEQ ID NO: 34 - RNA, 21 nt, synthetic construct
  source 1..21: mol_type = other RNA
gggaaatggacagagttatca

SEQ ID NO: 35 - RNA, 21 nt, synthetic construct
  source 1..21: mol_type = other RNA
caaatggacagagttatcaaa

SEQ ID NO: 36 - RNA, 21 nt, synthetic construct
  source 1..21: mol_type = other RNA
gggacagagttatcaaggcaa

SEQ ID NO: 37 - RNA, 21 nt, synthetic construct
  source 1..21: mol_type = other RNA
gtcaagaactactgccgaaaa

SEQ ID NO: 38 - RNA, 21 nt, synthetic construct
  source 1..21: mol_type = other RNA
gcaagaactactgccgaaata

SEQ ID NO: 39 - RNA, 21 nt, synthetic construct
  source 1..21: mol_type = other RNA
gaagaactactgccgaaatca

SEQ ID NO: 40 - RNA, 21 nt, synthetic construct
  source 1..21: mol_type = other RNA
gactgccgaaatccagatcca

SEQ ID NO: 41 - RNA, 21 nt, synthetic construct
  source 1..21: mol_type = other RNA
ctactgcaacctgacacgata

SEQ ID NO: 42 - RNA, 21 nt, synthetic construct
  source 1..21: mol_type = other RNA
ggacacgatgctcagatgcaa

SEQ ID NO: 43 - RNA, 21 nt, synthetic construct
  source 1..21: mol_type = other RNA
cgactgctactaccattatga

SEQ ID NO: 44 - RNA, 21 nt, synthetic construct
  source 1..21: mol_type = other RNA
cactgctactaccattatgga

SEQ ID NO: 45 - RNA, 21 nt, synthetic construct
  source 1..21: mol_type = other RNA
gctgctactaccattatggaa

SEQ ID NO: 46 - RNA, 21 nt, synthetic construct
  source 1..21: mol_type = other RNA
gactaccattatggacagaga

SEQ ID NO: 47 - RNA, 21 nt, synthetic construct
  source 1..21: mol_type = other RNA
gcttgccaagcttggtcatca

SEQ ID NO: 48 - RNA, 21 nt, synthetic construct
  source 1..21: mol_type = other RNA
gttgccaagcttggtcatcta

SEQ ID NO: 49 - RNA, 21 nt, synthetic construct
  source 1..21: mol_type = other RNA
gatagtcggaccccagaaaaa

SEQ ID NO: 50 - RNA, 21 nt, synthetic construct
  source 1..21: mol_type = other RNA
gcaggaactactgcaggaata

SEQ ID NO: 51 - RNA, 21 nt, synthetic construct
  source 1..21: mol_type = other RNA
caatccagatgctgagattca

SEQ ID NO: 52 - RNA, 21 nt, synthetic construct
  source 1..21: mol_type = other RNA
cagattcgcccttggtgttaa

SEQ ID NO: 53 - RNA, 21 nt, synthetic construct
  source 1..21: mol_type = other RNA
ccccttggtgttacaccatga

SEQ ID NO: 54 - RNA, 21 nt, synthetic construct
  source 1..21: mol_type = other RNA
gtggtgacagaatcaagtgta

SEQ ID NO: 55 - RNA, 21 nt, synthetic construct
  source 1..21: mol_type = other RNA
gatcaagtgtccttgcaacta

SEQ ID NO: 56 - RNA, 21 nt, synthetic construct
  source 1..21: mol_type = other RNA
cgggtccaggattgctaccaa

SEQ ID NO: 57 - RNA, 21 nt, synthetic construct
  source 1..21: mol_type = other RNA
gtgtcacaggaaggacatgta

SEQ ID NO: 58 - RNA, 21 nt, synthetic construct
  source 1..21: mol_type = other RNA
cgaaggacatgtcagtcttga

SEQ ID NO: 59 - RNA, 21 nt, synthetic construct
  source 1..21: mol_type = other RNA
caaggacatgtcagtcttgga

SEQ ID NO: 60 - RNA, 21 nt, synthetic construct
  source 1..21: mol_type = other RNA
ctcagtcttggtcctctatga

SEQ ID NO: 61 - RNA, 21 nt, synthetic construct
  source 1..21: mol_type = other RNA
ctccttggtgttataccatga

SEQ ID NO: 62 - RNA, 21 nt, synthetic construct
  source 1..21: mol_type = other RNA
gtggtgttataccatggatca

SEQ ID NO: 63 - RNA, 21 nt, synthetic construct
  source 1..21: mol_type = other RNA
gggtgttataccatggatcca

SEQ ID NO: 64 - RNA, 21 nt, synthetic construct
  source 1..21: mol_type = other RNA
cttataccatggatcccaata

SEQ ID NO: 65 - RNA, 21 nt, synthetic construct
  source 1..21: mol_type = other RNA
gataccatggatcccaatgta

SEQ ID NO: 66 - RNA, 21 nt, synthetic construct
  source 1..21: mol_type = other RNA
gcctgacacaatgtccagtga

SEQ ID NO: 67 - RNA, 21 nt, synthetic construct
  source 1..21: mol_type = other RNA
ggacacaatgtccagtgacaa

SEQ ID NO: 68 - RNA, 21 nt, synthetic construct
  source 1..21: mol_type = other RNA
gaatgtccagtgacagaatca

SEQ ID NO: 69 - RNA, 21 nt, synthetic construct
  source 1..21: mol_type = other RNA
gatgtccagtgacagaatcaa

SEQ ID NO: 70 - RNA, 21 nt, synthetic construct
  source 1..21: mol_type = other RNA
gtgtccagtgacagaatcaaa

SEQ ID NO: 71 - RNA, 21 nt, synthetic construct
  source 1..21: mol_type = other RNA
ggtccagtgacagaatcaaga

SEQ ID NO: 72 - RNA, 21 nt, synthetic construct
  source 1..21: mol_type = other RNA
gcagtgacagaatcaagtgta

SEQ ID NO: 73 - RNA, 21 nt, synthetic construct
  source 1..21: mol_type = other RNA
gattctccaccactgttacaa

SEQ ID NO: 74 - RNA, 21 nt, synthetic construct
  source 1..21: mol_type = other RNA
gccaccactgttacaggaaga

SEQ ID NO: 75 - RNA, 21 nt, synthetic construct
  source 1..21: mol_type = other RNA
gacagaatactacccaaatga

SEQ ID NO: 76 - RNA, 21 nt, synthetic construct
  source 1..21: mol_type = other RNA
gcagaatactacccaaatgga

SEQ ID NO: 77 - RNA, 21 nt, synthetic construct
  source 1..21: mol_type = other RNA
ggattcgcccttggtgttata

SEQ ID NO: 78 - RNA, 21 nt, synthetic construct
  source 1..21: mol_type = other RNA
cattcgcccttggtgttataa

SEQ ID NO: 79 - RNA, 21 nt, synthetic construct
  source 1..21: mol_type = other RNA
gtcgcccttggtgttatacca

SEQ ID NO: 80 - RNA, 21 nt, synthetic construct
  source 1..21: mol_type = other RNA
ccccttggtgttataccatga

SEQ ID NO: 81 - RNA, 21 nt, synthetic construct
  source 1..21: mol_type = other RNA
ggatgtccagtgacagaatca

SEQ ID NO: 82 - RNA, 21 nt, synthetic construct
  source 1..21: mol_type = other RNA
gcagaggctccttctgaacaa

SEQ ID NO: 83 - RNA, 21 nt, synthetic construct
  source 1..21: mol_type = other RNA
gatcttggtcatctatgataa

SEQ ID NO: 84 - RNA, 21 nt, synthetic construct
  source 1..21: mol_type = other RNA
ggacacaatgctcagaaacaa

SEQ ID NO: 85 - RNA, 21 nt, synthetic construct
  source 1..21: mol_type = other RNA
ccagtgctaccatggtaatga

SEQ ID NO: 86 - RNA, 21 nt, synthetic construct
  source 1..21: mol_type = other RNA
cagccccttattgttatacga

SEQ ID NO: 87 - RNA, 21 nt, synthetic construct
  source 1..21: mol_type = other RNA
agttatcgaggctcattctca

SEQ ID NO: 88 - RNA, 21 nt, synthetic construct
  source 1..21: mol_type = other RNA
tgacacaatgctcagacgcaa

SEQ ID NO: 89 - RNA, 21 nt, synthetic construct
  source 1..21: mol_type = other RNA
gacccaaatgctggcttgata

SEQ ID NO: 90 - RNA, 21 nt, synthetic construct
  source 1..21: mol_type = other RNA
gggtaatggacagagttatca

SEQ ID NO: 91 - RNA, 21 nt, synthetic construct
  source 1..21: mol_type = other RNA
ctaatggacagagttatcgaa

SEQ ID NO: 92 - RNA, 21 nt, synthetic construct
  source 1..21: mol_type = other RNA
cagttatcgaggcacatacta

SEQ ID NO: 93 - RNA, 21 nt, synthetic construct
  source 1..21: mol_type = other RNA
ctactgcaacctgacacaata

SEQ ID NO: 94 - RNA, 21 nt, synthetic construct
  source 1..21: mol_type = other RNA
cgactgctactaccattatga

SEQ ID NO: 95 - RNA, 21 nt, synthetic construct
  source 1..21: mol_type = other RNA
gttgccaagcttggtcatcta

SEQ ID NO: 96 - RNA, 21 nt, synthetic construct
  source 1..21: mol_type = other RNA
cagattcgcccttggtgttaa

SEQ ID NO: 97 - RNA, 21 nt, synthetic construct
  source 1..21: mol_type = other RNA
cgaaggacatgtcagtcttga

SEQ ID NO: 98 - RNA, 21 nt, synthetic construct
  source 1..21: mol_type = other RNA
ctccttggtgttataccatga

SEQ ID NO: 99 - RNA, 21 nt, synthetic construct
  source 1..21: mol_type = other RNA
ccccttggtgttataccatga

SEQ ID NO: 100 - RNA, 21 nt, synthetic construct
  source 1..21: mol_type = other RNA
ggacacaatgctcagaaacaa

SEQ ID NO: 101 - RNA, 21 nt, synthetic construct
  source 1..21: mol_type = other RNA
ctgatggacagagttatcgaa

SEQ ID NO: 102 - RNA, 21 nt, synthetic construct
  source 1..21: mol_type = other RNA
ggctccttattgttatacgaa

SEQ ID NO: 103 - RNA, 21 nt, synthetic construct
  source 1..21: mol_type = other RNA
gaagcaccaactgagcaaaga

SEQ ID NO: 104 - RNA, 21 nt, synthetic construct
  source 1..21: mol_type = other RNA
gggaaatggacagagttatca

SEQ ID NO: 105 - RNA, 21 nt, synthetic construct
  source 1..21: mol_type = other RNA
gctgctactaccattatggaa

SEQ ID NO: 106 - RNA, 21 nt, synthetic construct
  source 1..21: mol_type = other RNA
caatccagatgctgagattca

SEQ ID NO: 107 - RNA, 21 nt, synthetic construct
  source 1..21: mol_type = other RNA
gattctccaccactgttacaa

SEQ ID NO: 108 - RNA, 21 nt, synthetic construct
  source 1..21: mol_type = other RNA
gcagaatactacccaaatgga

SEQ ID NO: 109 - RNA, 21 nt, synthetic construct
  source 1..21: mol_type = other RNA
ggattcgcccttggtgttata

SEQ ID NO: 110 - RNA, 21 nt, synthetic construct
  source 1..21: mol_type = other RNA
cattcgcccttggtgttataa

SEQ ID NO: 111 - RNA, 21 nt, synthetic construct
  source 1..21: mol_type = other RNA
catggacagagttatcgagga

SEQ ID NO: 112 - RNA, 21 nt, synthetic construct
  source 1..21: mol_type = other RNA
gctgccaagcttggtcatcta

SEQ ID NO: 113 - RNA, 21 nt, synthetic construct
  source 1..21: mol_type = other RNA
cccaagcttggtcatctatga

SEQ ID NO: 114 - RNA, 21 nt, synthetic construct
  source 1..21: mol_type = other RNA
ggtgctaccatggtaatggaa

SEQ ID NO: 115 - RNA, 21 nt, synthetic construct
  source 1..21: mol_type = other RNA
gaccatggtaatggacagaga

SEQ ID NO: 116 - RNA, 21 nt, synthetic construct
  source 1..21: mol_type = other RNA
gtggtaatggacagagttata

SEQ ID NO: 117 - RNA, 21 nt, synthetic construct
  source 1..21: mol_type = other RNA
gagagttatcgaggcacataa

SEQ ID NO: 118 - RNA, 21 nt, synthetic construct
  source 1..21: mol_type = other RNA
caaatggacagagttatcaaa

SEQ ID NO: 119 - RNA, 21 nt, synthetic construct
  source 1..21: mol_type = other RNA
gggacagagttatcaaggcaa

SEQ ID NO: 120 - RNA, 21 nt, synthetic construct
  source 1..21: mol_type = other RNA
gatcaagtgtccttgcaacta

SEQ ID NO: 121 - RNA, 21 nt, synthetic construct
  source 1..21: mol_type = other RNA
cgggtccaggattgctaccaa

SEQ ID NO: 122 - RNA, 21 nt, synthetic construct
  source 1..21: mol_type = other RNA
gtgtcacaggaaggacatgta

SEQ ID NO: 123 - RNA, 21 nt, synthetic construct
  source 1..21: mol_type = other RNA
gatgtccagtgacagaatcaa

SEQ ID NO: 124 - RNA, 21 nt, synthetic construct
  source 1..21: mol_type = other RNA
gcagaggctccttctgaacaa

SEQ ID NO: 125 - RNA, 21 nt, synthetic construct
  source 1..21: mol_type = other RNA
catggacagagttatcgagga

SEQ ID NO: 126 - RNA, 21 nt, synthetic construct
  source 1..21: mol_type = other RNA
gaccatggtaatggacagaga

SEQ ID NO: 127 - RNA, 21 nt, synthetic construct
  source 1..21: mol_type = other RNA
gggacagagttatcaaggcaa

SEQ ID NO: 128 - RNA, 21 nt, synthetic construct
  source 1..21: mol_type = other RNA
cgggtccaggattgctaccaa

SEQ ID NO: 129 - RNA, 21 nt, synthetic construct
  source 1..21: mol_type = other RNA
ttggtagcaatcctggaccag

SEQ ID NO: 130 - RNA, 21 nt, synthetic construct
  source 1..21: mol_type = other RNA
ttcgataactctgtccatcag

SEQ ID NO: 131 - RNA, 21 nt, synthetic construct
  source 1..21: mol_type = other RNA
tcctcgataactctgtccatg

SEQ ID NO: 132 - RNA, 21 nt, synthetic construct
  source 1..21: mol_type = other RNA
tgatgaccaagcttggcaggc

SEQ ID NO: 133 - RNA, 21 nt, synthetic construct
  source 1..21: mol_type = other RNA
tagatgaccaagcttggcagc

SEQ ID NO: 134 - RNA, 21 nt, synthetic construct
  source 1..21: mol_type = other RNA
tcatagatgaccaagcttggg

SEQ ID NO: 135 - RNA, 21 nt, synthetic construct
  source 1..21: mol_type = other RNA
tgtcatagatgaccaagcttc

SEQ ID NO: 136 - RNA, 21 nt, synthetic construct
  source 1..21: mol_type = other RNA
taagccagcatttgggtagtc

SEQ ID NO: 137 - RNA, 21 nt, synthetic construct
  source 1..21: mol_type = other RNA
ttcaagccagcatttgggtac

SEQ ID NO: 138 - RNA, 21 nt, synthetic construct
  source 1..21: mol_type = other RNA
tatcaagccagcatttgggtc

SEQ ID NO: 139 - RNA, 21 nt, synthetic construct
  source 1..21: mol_type = other RNA
ttcgtataacaataaggagcc

SEQ ID NO: 140 - RNA, 21 nt, synthetic construct
  source 1..21: mol_type = other RNA
ttcggaaggagcctctaggcc

SEQ ID NO: 141 - RNA, 21 nt, synthetic construct
  source 1..21: mol_type = other RNA
ttgttcggaaggagcctctac

SEQ ID NO: 142 - RNA, 21 nt, synthetic construct
  source 1..21: mol_type = other RNA
tctttgctcagtcggtgcttc

SEQ ID NO: 143 - RNA, 21 nt, synthetic construct
  source 1..21: mol_type = other RNA
tcattaccatggtagcactcg

SEQ ID NO: 144 - RNA, 21 nt, synthetic construct
  source 1..21: mol_type = other RNA
ttccattaccatggtagcacc

SEQ ID NO: 145 - RNA, 21 nt, synthetic construct
  source 1..21: mol_type = other RNA
tctctgtccattaccatggtc

SEQ ID NO: 146 - RNA, 21 nt, synthetic construct
  source 1..21: mol_type = other RNA
tataactctgtccattaccac

SEQ ID NO: 147 - RNA, 21 nt, synthetic construct
  source 1..21: mol_type = other RNA
tgataactctgtccattaccc

SEQ ID NO: 148 - RNA, 21 nt, synthetic construct
  source 1..21: mol_type = other RNA
ttcgataactctgtccattag

SEQ ID NO: 149 - RNA, 21 nt, synthetic construct
  source 1..21: mol_type = other RNA
ttatgtgcctcgataactctc

SEQ ID NO: 150 - RNA, 21 nt, synthetic construct
  source 1..21: mol_type = other RNA
tagtatgtgcctcgataactg

SEQ ID NO: 151 - RNA, 21 nt, synthetic construct
  source 1..21: mol_type = other RNA
tctctgtccattaccgtggtc

SEQ ID NO: 152 - RNA, 21 nt, synthetic construct
  source 1..21: mol_type = other RNA
tggatctggattcctgcagtc

SEQ ID NO: 153 - RNA, 21 nt, synthetic construct
  source 1..21: mol_type = other RNA
tataacaataaggggctgccc

SEQ ID NO: 154 - RNA, 21 nt, synthetic construct
  source 1..21: mol_type = other RNA
tcgtataacaataaggggctc

SEQ ID NO: 155 - RNA, 21 nt, synthetic construct
  source 1..21: mol_type = other RNA
tgtactcccacctgacactgc

SEQ ID NO: 156 - RNA, 21 nt, synthetic construct
  source 1..21: mol_type = other RNA
tattgtgtcaggttgcagtag

SEQ ID NO: 157 - RNA, 21 nt, synthetic construct
  source 1..21: mol_type = other RNA
ttgcgtctgagcattgtgtcc

SEQ ID NO: 158 - RNA, 21 nt, synthetic construct
  source 1..21: mol_type = other RNA
ttgttcagaaggagcctctac

SEQ ID NO: 159 - RNA, 21 nt, synthetic construct
  source 1..21: mol_type = other RNA
tgcttgttcagaaggagcctg

SEQ ID NO: 160 - RNA, 21 nt, synthetic construct
  source 1..21: mol_type = other RNA
tctttgctcagttggtgcttc

SEQ ID NO: 161 - RNA, 21 nt, synthetic construct
  source 1..21: mol_type = other RNA
tgataactctgtccatttccc

SEQ ID NO: 162 - RNA, 21 nt, synthetic construct
  source 1..21: mol_type = other RNA
tttgataactctgtccatttg

SEQ ID NO: 163 - RNA, 21 nt, synthetic construct
  source 1..21: mol_type = other RNA
ttgccttgataactctgtccc

SEQ ID NO: 164 - RNA, 21 nt, synthetic construct
  source 1..21: mol_type = other RNA
ttttcggcagtagttcttgac

SEQ ID NO: 165 - RNA, 21 nt, synthetic construct
  source 1..21: mol_type = other RNA
tatttcggcagtagttcttgc

SEQ ID NO: 166 - RNA, 21 nt, synthetic construct
  source 1..21: mol_type = other RNA
tgatttcggcagtagttcttc

SEQ ID NO: 167 - RNA, 21 nt, synthetic construct
  source 1..21: mol_type = other RNA
tggatctggatttcggcagtc

SEQ ID NO: 168 - RNA, 21 nt, synthetic construct
  source 1..21: mol_type = other RNA
tatcgtgtcaggttgcagtag

SEQ ID NO: 169 - RNA, 21 nt, synthetic construct
  source 1..21: mol_type = other RNA
ttgcatctgagcatcgtgtcc

SEQ ID NO: 170 - RNA, 21 nt, synthetic construct
  source 1..21: mol_type = other RNA
tcataatggtagtagcagtcg

SEQ ID NO: 171 - RNA, 21 nt, synthetic construct
  source 1..21: mol_type = other RNA
tccataatggtagtagcagtg

SEQ ID NO: 172 - RNA, 21 nt, synthetic construct
  source 1..21: mol_type = other RNA
ttccataatggtagtagcagc

SEQ ID NO: 173 - RNA, 21 nt, synthetic construct
  source 1..21: mol_type = other RNA
tctctgtccataatggtagtc

SEQ ID NO: 174 - RNA, 21 nt, synthetic construct
  source 1..21: mol_type = other RNA
tgatgaccaagcttggcaagc

SEQ ID NO: 175 - RNA, 21 nt, synthetic construct
  source 1..21: mol_type = other RNA
tagatgaccaagcttggcaac

SEQ ID NO: 176 - RNA, 21 nt, synthetic construct
  source 1..21: mol_type = other RNA
tttttctggggtccgactatc

SEQ ID NO: 177 - RNA, 21 nt, synthetic construct
  source 1..21: mol_type = other RNA
tattcctgcagtagttcctgc

SEQ ID NO: 178 - RNA, 21 nt, synthetic construct
  source 1..21: mol_type = other RNA
tgaatctcagcatctggattg

SEQ ID NO: 179 - RNA, 21 nt, synthetic construct
  source 1..21: mol_type = other RNA
ttaacaccaagggcgaatctg

SEQ ID NO: 180 - RNA, 21 nt, synthetic construct
  source 1..21: mol_type = other RNA
tcatggtgtaacaccaagggg

SEQ ID NO: 181 - RNA, 21 nt, synthetic construct
  source 1..21: mol_type = other RNA
tacacttgattctgtcaccac

SEQ ID NO: 182 - RNA, 21 nt, synthetic construct
  source 1..21: mol_type = other RNA
tagttgcaaggacacttgatc

SEQ ID NO: 183 - RNA, 21 nt, synthetic construct
  source 1..21: mol_type = other RNA
ttggtagcaatcctggacccg

SEQ ID NO: 184 - RNA, 21 nt, synthetic construct
  source 1..21: mol_type = other RNA
tacatgtccttcctgtgacac

SEQ ID NO: 185 - RNA, 21 nt, synthetic construct
  source 1..21: mol_type = other RNA
tcaagactgacatgtccttcg

SEQ ID NO: 186 - RNA, 21 nt, synthetic construct
  source 1..21: mol_type = other RNA
tccaagactgacatgtccttg

SEQ ID NO: 187 - RNA, 21 nt, synthetic construct
  source 1..21: mol_type = other RNA
tcatagaggaccaagactgag

SEQ ID NO: 188 - RNA, 21 nt, synthetic construct
  source 1..21: mol_type = other RNA
tcatggtataacaccaaggag

SEQ ID NO: 189 - RNA, 21 nt, synthetic construct
  source 1..21: mol_type = other RNA
tgatccatggtataacaccac

SEQ ID NO: 190 - RNA, 21 nt, synthetic construct
  source 1..21: mol_type = other RNA
tggatccatggtataacaccc

SEQ ID NO: 191 - RNA, 21 nt, synthetic construct
  source 1..21: mol_type = other RNA
tattgggatccatggtataag

SEQ ID NO: 192 - RNA, 21 nt, synthetic construct
  source 1..21: mol_type = other RNA
tacattgggatccatggtatc

SEQ ID NO: 193 - RNA, 21 nt, synthetic construct
  source 1..21: mol_type = other RNA
tcactggacattgtgtcaggc

SEQ ID NO: 194 - RNA, 21 nt, synthetic construct
  source 1..21: mol_type = other RNA
ttgtcactggacattgtgtcc

SEQ ID NO: 195 - RNA, 21 nt, synthetic construct
  source 1..21: mol_type = other RNA
tgattctgtcactggacattc

SEQ ID NO: 196 - RNA, 21 nt, synthetic construct
  source 1..21: mol_type = other RNA
ttgattctgtcactggacatc

SEQ ID NO: 197 - RNA, 21 nt, synthetic construct
  source 1..21: mol_type = other RNA
tttgattctgtcactggacac

SEQ ID NO: 198 - RNA, 21 nt, synthetic construct
  source 1..21: mol_type = other RNA
tcttgattctgtcactggacc

SEQ ID NO: 199 - RNA, 21 nt, synthetic construct
  source 1..21: mol_type = other RNA
tacacttgattctgtcactgc

SEQ ID NO: 200 - RNA, 21 nt, synthetic construct
  source 1..21: mol_type = other RNA
ttgtaacagtggtggagaatc

SEQ ID NO: 201 - RNA, 21 nt, synthetic construct
  source 1..21: mol_type = other RNA
tcttcctgtaacagtggtggc

SEQ ID NO: 202 - RNA, 21 nt, synthetic construct
  source 1..21: mol_type = other RNA
tcatttgggtagtattctgtc

SEQ ID NO: 203 - RNA, 21 nt, synthetic construct
  source 1..21: mol_type = other RNA
tccatttgggtagtattctgc

SEQ ID NO: 204 - RNA, 21 nt, synthetic construct
  source 1..21: mol_type = other RNA
tataacaccaagggcgaatcc

SEQ ID NO: 205 - RNA, 21 nt, synthetic construct
  source 1..21: mol_type = other RNA
ttataacaccaagggcgaatg

SEQ ID NO: 206 - RNA, 21 nt, synthetic construct
  source 1..21: mol_type = other RNA
tggtataacaccaagggcgac

SEQ ID NO: 207 - RNA, 21 nt, synthetic construct
  source 1..21: mol_type = other RNA
tcatggtataacaccaagggg

SEQ ID NO: 208 - RNA, 21 nt, synthetic construct
  source 1..21: mol_type = other RNA
tgattctgtcactggacatcc

SEQ ID NO: 209 - RNA, 21 nt, synthetic construct
  source 1..21: mol_type = other RNA
ttgttcagaaggagcctctgc

SEQ ID NO: 210 - RNA, 21 nt, synthetic construct
  source 1..21: mol_type = other RNA
ttatcatagatgaccaagatc

SEQ ID NO: 211 - RNA, 21 nt, synthetic construct
  source 1..21: mol_type = other RNA
ttgtttctgagcattgtgtcc

SEQ ID NO: 212 - RNA, 21 nt, synthetic construct
  source 1..21: mol_type = other RNA
tcattaccatggtagcactgg

SEQ ID NO: 213 - RNA, 21 nt, synthetic construct
  source 1..21: mol_type = other RNA
tcgtataacaataaggggctg

SEQ ID NO: 214 - RNA, 21 nt, synthetic construct
  source 1..21: mol_type = other RNA
tgagaatgagcctcgataact

SEQ ID NO: 215 - RNA, 21 nt, synthetic construct
  source 1..21: mol_type = other RNA
ttgcgtctgagcattgtgtca

SEQ ID NO: 216 - RNA, 21 nt, synthetic construct
  source 1..21: mol_type = other RNA
tatcaagccagcatttgggtc

SEQ ID NO: 217 - RNA, 21 nt, synthetic construct
  source 1..21: mol_type = other RNA
tgataactctgtccattaccc

SEQ ID NO: 218 - RNA, 21 nt, synthetic construct
  source 1..21: mol_type = other RNA
ttcgataactctgtccattag

SEQ ID NO: 219 - RNA, 21 nt, synthetic construct
  source 1..21: mol_type = other RNA
tagtatgtgcctcgataactg

SEQ ID NO: 220 - RNA, 21 nt, synthetic construct
  source 1..21: mol_type = other RNA
tattgtgtcaggttgcagtag

SEQ ID NO: 221 - RNA, 21 nt, synthetic construct
  source 1..21: mol_type = other RNA
tcataatggtagtagcagtcg

SEQ ID NO: 222 - RNA, 21 nt, synthetic construct
  source 1..21: mol_type = other RNA
tagatgaccaagcttggcaac

SEQ ID NO: 223 - RNA, 21 nt, synthetic construct
  source 1..21: mol_type = other RNA
ttaacaccaagggcgaatctg

SEQ ID NO: 224 - RNA, 21 nt, synthetic construct
  source 1..21: mol_type = other RNA
tcaagactgacatgtccttcg

SEQ ID NO: 225 - RNA, 21 nt, synthetic construct
  source 1..21: mol_type = other RNA
tcatggtataacaccaaggag

SEQ ID NO: 226 - RNA, 21 nt, synthetic construct
  source 1..21: mol_type = other RNA
tcatggtataacaccaagggg

SEQ ID NO: 227 - RNA, 21 nt, synthetic construct
  source 1..21: mol_type = other RNA
ttgtttctgagcattgtgtcc

SEQ ID NO: 228 - RNA, 21 nt, synthetic construct
  source 1..21: mol_type = other RNA
ttcgataactctgtccatcag

SEQ ID NO: 229 - RNA, 21 nt, synthetic construct
  source 1..21: mol_type = other RNA
ttcgtataacaataaggagcc

SEQ ID NO: 230 - RNA, 21 nt, synthetic construct
  source 1..21: mol_type = other RNA
tctttgctcagttggtgcttc

SEQ ID NO: 231 - RNA, 21 nt, synthetic construct
  source 1..21: mol_type = other RNA
tgataactctgtccatttccc

SEQ ID NO: 232 - RNA, 21 nt, synthetic construct
  source 1..21: mol_type = other RNA
ttccataatggtagtagcagc

SEQ ID NO: 233 - RNA, 21 nt, synthetic construct
  source 1..21: mol_type = other RNA
tgaatctcagcatctggattg

SEQ ID NO: 234 - RNA, 21 nt, synthetic construct
  source 1..21: mol_type = other RNA
ttgtaacagtggtggagaatc

SEQ ID NO: 235 - RNA, 21 nt, synthetic construct
  source 1..21: mol_type = other RNA
tccatttgggtagtattctgc

SEQ ID NO: 236 - RNA, 21 nt, synthetic construct
  source 1..21: mol_type = other RNA
tataacaccaagggcgaatcc

SEQ ID NO: 237 - RNA, 21 nt, synthetic construct
  source 1..21: mol_type = other RNA
ttataacaccaagggcgaatg

SEQ ID NO: 238 - RNA, 21 nt, synthetic construct
  source 1..21: mol_type = other RNA
tcctcgataactctgtccatg

SEQ ID NO: 239 - RNA, 21 nt, synthetic construct
  source 1..21: mol_type = other RNA
tagatgaccaagcttggcagc

SEQ ID NO: 240 - RNA, 21 nt, synthetic construct
  source 1..21: mol_type = other RNA
tcatagatgaccaagcttggg

SEQ ID NO: 241 - RNA, 21 nt, synthetic construct
  source 1..21: mol_type = other RNA
ttccattaccatggtagcacc

SEQ ID NO: 242 - RNA, 21 nt, synthetic construct
  source 1..21: mol_type = other RNA
tctctgtccattaccatggtc

SEQ ID NO: 243 - RNA, 21 nt, synthetic construct
  source 1..21: mol_type = other RNA
tataactctgtccattaccac

SEQ ID NO: 244 - RNA, 21 nt, synthetic construct
  source 1..21: mol_type = other RNA
ttatgtgcctcgataactctc

SEQ ID NO: 245 - RNA, 21 nt, synthetic construct
  source 1..21: mol_type = other RNA
tttgataactctgtccatttg

SEQ ID NO: 246 - RNA, 21 nt, synthetic construct
  source 1..21: mol_type = other RNA
ttgccttgataactctgtccc

SEQ ID NO: 247 - RNA, 21 nt, synthetic construct
  source 1..21: mol_type = other RNA
tagttgcaaggacacttgatc

SEQ ID NO: 248 - RNA, 21 nt, synthetic construct
  source 1..21: mol_type = other RNA
ttggtagcaatcctggacccg

SEQ ID NO: 249 - RNA, 21 nt, synthetic construct
  source 1..21: mol_type = other RNA
tacatgtccttcctgtgacac

SEQ ID NO: 250 - RNA, 21 nt, synthetic construct
  source 1..21: mol_type = other RNA
ttgattctgtcactggacatc

SEQ ID NO: 251 - RNA, 21 nt, synthetic construct
  source 1..21: mol_type = other RNA
ttgttcagaaggagcctctgc

SEQ ID NO: 252 - RNA, 21 nt, synthetic construct
  source 1..21: mol_type = other RNA
tcctcgataactctgtccatg

SEQ ID NO: 253 - RNA, 21 nt, synthetic construct
  source 1..21: mol_type = other RNA
tctctgtccattaccatggtc

SEQ ID NO: 254 - RNA, 21 nt, synthetic construct
  source 1..21: mol_type = other RNA
ttgccttgataactctgtccc

SEQ ID NO: 255 - RNA, 21 nt, synthetic construct
  source 1..21: mol_type = other RNA
ttggtagcaatcctggacccg

SEQ ID NO: 256 - RNA, 21 nt, synthetic construct
  source 1..21: mol_type = other RNA
  modified_base 1: mod_base = OTHER; note = 2'-O-methyl modified nucleotide with thiophosphate linkage
  modified_base 2: mod_base = OTHER; note = 2'-O-methyl modified nucleotide with thiophosphate linkage
  modified_base 3: mod_base = OTHER; note = 2'-O-methyl modified nucleotide
  modified_base 4: mod_base = OTHER; note = 2'-O-methyl modified nucleotide
  modified_base 5: mod_base = OTHER; note = 2'-O-methyl modified nucleotide
  modified_base 6: mod_base = OTHER; note = 2'-O-methyl modified nucleotide
  modified_base 7: mod_base = OTHER; note = 2'-O-methyl modified nucleotide
  modified_base 8: mod_base = OTHER; note = 2'-O-methyl modified nucleotide
  modified_base 9: mod_base = OTHER; note = 2'-fluoro modified nucleotide
  modified_base 10: mod_base = OTHER; note = 2'-O-methyl modified nucleotide
  modified_base 11: mod_base = OTHER; note = 2'-fluoro modified nucleotide
  modified_base 12: mod_base = OTHER; note = 2'-O-methyl modified nucleotide
  modified_base 13: mod_base = OTHER; note = 2'-fluoro modified nucleotide
  modified_base 14: mod_base = OTHER; note = 2'-O-methyl modified nucleotide
  modified_base 15: mod_base = OTHER; note = 2'-O-methyl modified nucleotide
  modified_base 16: mod_base = OTHER; note = 2'-O-methyl modified nucleotide
  modified_base 17: mod_base = OTHER; note = 2'-O-methyl modified nucleotide
  modified_base 18: mod_base = OTHER; note = 2'-O-methyl modified nucleotide
  modified_base 19: mod_base = OTHER; note = 2'-O-methyl modified nucleotide
  modified_base 20: mod_base = OTHER; note = 2'-O-methyl modified nucleotide with thiophosphate linkage
  modified_base 21: mod_base = OTHER; note = 2'-O-methyl modified nucleotide
ctggtccaggattgctaccaa

SEQ ID NO: 257 - RNA, 21 nt, synthetic construct
  source 1..21: mol_type = other RNA
  modified_base 1: mod_base = OTHER; note = 2'-O-methyl modified nucleotide with thiophosphate linkage
  modified_base 2: mod_base = OTHER; note = 2'-O-methyl modified nucleotide with thiophosphate linkage
  modified_base 3: mod_base = OTHER; note = 2'-O-methyl modified nucleotide
  modified_base 4: mod_base = OTHER; note = 2'-O-methyl modified nucleotide
  modified_base 5: mod_base = OTHER; note = 2'-O-methyl modified nucleotide
  modified_base 6: mod_base = OTHER; note = 2'-O-methyl modified nucleotide
  modified_base 7: mod_base = OTHER; note = 2'-O-methyl modified nucleotide
  modified_base 8: mod_base = OTHER; note = 2'-O-methyl modified nucleotide
  modified_base 9: mod_base = OTHER; note = 2'-fluoro modified nucleotide
  modified_base 10: mod_base = OTHER; note = 2'-O-methyl modified nucleotide
  modified_base 11: mod_base = OTHER; note = 2'-fluoro modified nucleotide
  modified_base 12: mod_base = OTHER; note = 2'-O-methyl modified nucleotide
  modified_base 13: mod_base = OTHER; note = 2'-fluoro modified nucleotide
  modified_base 14: mod_base = OTHER; note = 2'-O-methyl modified nucleotide
  modified_base 15: mod_base = OTHER; note = 2'-O-methyl modified nucleotide
  modified_base 16: mod_base = OTHER; note = 2'-O-methyl modified nucleotide
  modified_base 17: mod_base = OTHER; note = 2'-O-methyl modified nucleotide
  modified_base 18: mod_base = OTHER; note = 2'-O-methyl modified nucleotide
  modified_base 19: mod_base = OTHER; note = 2'-O-methyl modified nucleotide
  modified_base 20: mod_base = OTHER; note = 2'-O-methyl modified nucleotide with thiophosphate linkage
  modified_base 21: mod_base = OTHER; note = 2'-O-methyl modified nucleotide
ctgatggacagagttatcgaa

SEQ ID NO: 258 - RNA, 21 nt, synthetic construct
  source 1..21: mol_type = other RNA
  modified_base 1: mod_base = OTHER; note = 2'-O-methyl modified nucleotide with thiophosphate linkage
  modified_base 2: mod_base = OTHER; note = 2'-O-methyl modified nucleotide with thiophosphate linkage
  modified_base 3: mod_base = OTHER; note = 2'-O-methyl modified nucleotide
  modified_base 4: mod_base = OTHER; note = 2'-O-methyl modified nucleotide
  modified_base 5: mod_base = OTHER; note = 2'-O-methyl modified nucleotide
  modified_base 6: mod_base = OTHER; note = 2'-O-methyl modified nucleotide
  modified_base 7: mod_base = OTHER; note = 2'-O-methyl modified nucleotide
  modified_base 8: mod_base = OTHER; note = 2'-O-methyl modified nucleotide
  modified_base 9: mod_base = OTHER; note = 2'-fluoro modified nucleotide
  modified_base 10: mod_base = OTHER; note = 2'-O-methyl modified nucleotide
  modified_base 11: mod_base = OTHER; note = 2'-fluoro modified nucleotide
  modified_base 12: mod_base = OTHER; note = 2'-O-methyl modified nucleotide
  modified_base 13: mod_base = OTHER; note = 2'-fluoro modified nucleotide
  modified_base 14: mod_base = OTHER; note = 2'-O-methyl modified nucleotide
  modified_base 15: mod_base = OTHER; note = 2'-O-methyl modified nucleotide
  modified_base 16: mod_base = OTHER; note = 2'-O-methyl modified nucleotide
  modified_base 17: mod_base = OTHER; note = 2'-O-methyl modified nucleotide
  modified_base 18: mod_base = OTHER; note = 2'-O-methyl modified nucleotide
  modified_base 19: mod_base = OTHER; note = 2'-O-methyl modified nucleotide
  modified_base 20: mod_base = OTHER; note = 2'-O-methyl modified nucleotide with thiophosphate linkage
  modified_base 21: mod_base = OTHER; note = 2'-O-methyl modified nucleotide
catggacagagttatcgagga

SEQ ID NO: 259 - RNA, 21 nt, synthetic construct
  source 1..21: mol_type = other RNA
  modified_base 1: mod_base = OTHER; note = 2'-O-methyl modified nucleotide with thiophosphate linkage
  modified_base 2: mod_base = OTHER; note = 2'-O-methyl modified nucleotide with thiophosphate linkage
  modified_base 3: mod_base = OTHER; note = 2'-O-methyl modified nucleotide
  modified_base 4: mod_base = OTHER; note = 2'-O-methyl modified nucleotide
  modified_base 5: mod_base = OTHER; note = 2'-O-methyl modified nucleotide
  modified_base 6: mod_base = OTHER; note = 2'-O-methyl modified nucleotide
  modified_base 7: mod_base = OTHER; note = 2'-O-methyl modified nucleotide
  modified_base 8: mod_base = OTHER; note = 2'-O-methyl modified nucleotide
  modified_base 9: mod_base = OTHER; note = 2'-fluoro modified nucleotide
  modified_base 10: mod_base = OTHER; note = 2'-O-methyl modified nucleotide
  modified_base 11: mod_base = OTHER; note = 2'-fluoro modified nucleotide
  modified_base 12: mod_base = OTHER; note = 2'-O-methyl modified nucleotide
  modified_base 13: mod_base = OTHER; note = 2'-fluoro modified nucleotide
  modified_base 14: mod_base = OTHER; note = 2'-O-methyl modified nucleotide
  modified_base 15: mod_base = OTHER; note = 2'-O-methyl modified nucleotide
  modified_base 16: mod_base = OTHER; note = 2'-O-methyl modified nucleotide
  modified_base 17: mod_base = OTHER; note = 2'-O-methyl modified nucleotide
  modified_base 18: mod_base = OTHER; note = 2'-O-methyl modified nucleotide
  modified_base 19: mod_base = OTHER; note = 2'-O-methyl modified nucleotide
  modified_base 20: mod_base = OTHER; note = 2'-O-methyl modified nucleotide with thiophosphate linkage
  modified_base 21: mod_base = OTHER; note = 2'-O-methyl modified nucleotide
gcctgccaagcttggtcatca

SEQ ID NO: 260 - RNA, 21 nt, synthetic construct
  source 1..21: mol_type = other RNA
  modified_base 1: mod_base = OTHER; note = 2'-O-methyl modified nucleotide with thiophosphate linkage
  modified_base 2: mod_base = OTHER; note = 2'-O-methyl modified nucleotide with thiophosphate linkage
  modified_base 3: mod_base = OTHER; note = 2'-O-methyl modified nucleotide
  modified_base 4: mod_base = OTHER; note = 2'-O-methyl modified nucleotide
  modified_base 5: mod_base = OTHER; note = 2'-O-methyl modified nucleotide
  modified_base 6: mod_base = OTHER; note = 2'-O-methyl modified nucleotide
  modified_base 7: mod_base = OTHER; note = 2'-O-methyl modified nucleotide
  modified_base 8: mod_base = OTHER; note = 2'-O-methyl modified nucleotide
  modified_base 9: mod_base = OTHER; note = 2'-fluoro modified nucleotide
  modified_base 10: mod_base = OTHER; note = 2'-O-methyl modified nucleotide
  modified_base 11: mod_base = OTHER; note = 2'-fluoro modified nucleotide
  modified_base 12: mod_base = OTHER; note = 2'-O-methyl modified nucleotide
  modified_base 13: mod_base = OTHER; note = 2'-fluoro modified nucleotide
  modified_base 14: mod_base = OTHER; note = 2'-O-methyl modified nucleotide
  modified_base 15: mod_base = OTHER; note = 2'-O-methyl modified nucleotide
  modified_base 16: mod_base = OTHER; note = 2'-O-methyl modified nucleotide
  modified_base 17: mod_base = OTHER; note = 2'-O-methyl modified nucleotide
  modified_base 18: mod_base = OTHER; note = 2'-O-methyl modified nucleotide
  modified_base 19: mod_base = OTHER; note = 2'-O-methyl modified nucleotide
  modified_base 20: mod_base = OTHER; note = 2'-O-methyl modified nucleotide with thiophosphate linkage
  modified_base 21: mod_base = OTHER; note = 2'-O-methyl modified nucleotide
gctgccaagcttggtcatcta

SEQ ID NO: 261 - RNA, 21 nt, synthetic construct
  source 1..21: mol_type = other RNA
  modified_base 1: mod_base = OTHER; note = 2'-O-methyl modified nucleotide with thiophosphate linkage
  modified_base 2: mod_base = OTHER; note = 2'-O-methyl modified nucleotide with thiophosphate linkage
  modified_base 3: mod_base = OTHER; note = 2'-O-methyl modified nucleotide
  modified_base 4: mod_base = OTHER; note = 2'-O-methyl modified nucleotide
  modified_base 5: mod_base = OTHER; note = 2'-O-methyl modified nucleotide
  modified_base 6: mod_base = OTHER; note = 2'-O-methyl modified nucleotide
  modified_base 7: mod_base = OTHER; note = 2'-O-methyl modified nucleotide
  modified_base 8: mod_base = OTHER; note = 2'-O-methyl modified nucleotide
  modified_base 9: mod_base = OTHER; note = 2'-fluoro modified nucleotide
  modified_base 10: mod_base = OTHER; note = 2'-O-methyl modified nucleotide
  modified_base 11: mod_base = OTHER; note = 2'-fluoro modified nucleotide
  modified_base 12: mod_base = OTHER; note = 2'-O-methyl modified nucleotide
  modified_base 13: mod_base = OTHER; note = 2'-fluoro modified nucleotide
  modified_base 14: mod_base = OTHER; note = 2'-O-methyl modified nucleotide
  modified_base 15: mod_base = OTHER; note = 2'-O-methyl modified nucleotide
  modified_base 16: mod_base = OTHER; note = 2'-O-methyl modified nucleotide
  modified_base 17: mod_base = OTHER; note = 2'-O-methyl modified nucleotide
  modified_base 18: mod_base = OTHER; note = 2'-O-methyl modified nucleotide
  modified_base 19: mod_base = OTHER; note = 2'-O-methyl modified nucleotide
  modified_base 20: mod_base = OTHER; note = 2'-O-methyl modified nucleotide with thiophosphate linkage
  modified_base 21: mod_base = OTHER; note = 2'-O-methyl modified nucleotide
cccaagcttggtcatctatga

SEQ ID NO: 262 - RNA, 21 nt, synthetic construct
  source 1..21: mol_type = other RNA
  modified_base 1: mod_base = OTHER; note = 2'-O-methyl modified nucleotide with thiophosphate linkage
  modified_base 2: mod_base = OTHER; note = 2'-O-methyl modified nucleotide with thiophosphate linkage
  modified_base 3: mod_base = OTHER; note = 2'-O-methyl modified nucleotide
  modified_base 4: mod_base = OTHER; note = 2'-O-methyl modified nucleotide
  modified_base 5: mod_base = OTHER; note = 2'-O-methyl modified nucleotide
  modified_base 6: mod_base = OTHER; note = 2'-O-methyl modified nucleotide
  modified_base 7: mod_base = OTHER; note = 2'-O-methyl modified nucleotide
  modified_base 8: mod_base = OTHER; note = 2'-O-methyl modified nucleotide
  modified_base 9: mod_base = OTHER; note = 2'-fluoro modified nucleotide
  modified_base 10: mod_base = OTHER; note = 2'-O-methyl modified nucleotide
  modified_base 11: mod_base = OTHER; note = 2'-fluoro modified nucleotide
  modified_base 12: mod_base = OTHER; note = 2'-O-methyl modified nucleotide
  modified_base 13: mod_base = OTHER; note = 2'-fluoro modified nucleotide
  modified_base 14: mod_base = OTHER; note = 2'-O-methyl modified nucleotide
  modified_base 15: mod_base = OTHER; note = 2'-O-methyl modified nucleotide
  modified_base 16: mod_base = OTHER; note = 2'-O-methyl modified nucleotide
  modified_base 17: mod_base = OTHER; note = 2'-O-methyl modified nucleotide
  modified_base 18: mod_base = OTHER; note = 2'-O-methyl modified nucleotide
  modified_base 19: mod_base = OTHER; note = 2'-O-methyl modified nucleotide
  modified_base 20: mod_base = OTHER; note = 2'-O-methyl modified nucleotide with thiophosphate linkage
  modified_base 21: mod_base = OTHER; note = 2'-O-methyl modified nucleotide
gaagcttggtcatctatgaca

SEQ ID NO: 263 - RNA, 21 nt, synthetic construct
  source 1..21: mol_type = other RNA
  modified_base 1: mod_base = OTHER; note = 2'-O-methyl modified nucleotide with thiophosphate linkage
  modified_base 2: mod_base = OTHER; note = 2'-O-methyl modified nucleotide with thiophosphate linkage
  modified_base 3: mod_base = OTHER; note = 2'-O-methyl modified nucleotide
  modified_base 4: mod_base = OTHER; note = 2'-O-methyl modified nucleotide
  modified_base 5: mod_base = OTHER; note = 2'-O-methyl modified nucleotide
  modified_base 6: mod_base = OTHER; note = 2'-O-methyl modified nucleotide
  modified_base 7: mod_base = OTHER; note = 2'-O-methyl modified nucleotide
  modified_base 8: mod_base = OTHER; note = 2'-O-methyl modified nucleotide
  modified_base 9: mod_base = OTHER; note = 2'-fluoro modified nucleotide
  modified_base 10: mod_base = OTHER; note = 2'-O-methyl modified nucleotide
  modified_base 11: mod_base = OTHER; note = 2'-fluoro modified nucleotide
  modified_base 12: mod_base = OTHER; note = 2'-O-methyl modified nucleotide
  modified_base 13: mod_base = OTHER; note = 2'-fluoro modified nucleotide
  modified_base 14: mod_base = OTHER; note = 2'-O-methyl modified nucleotide
  modified_base 15: mod_base = OTHER; note = 2'-O-methyl modified nucleotide
  modified_base 16: mod_base = OTHER; note = 2'-O-methyl modified nucleotide
  modified_base 17: mod_base = OTHER; note = 2'-O-methyl modified nucleotide
  modified_base 18: mod_base = OTHER; note = 2'-O-methyl modified nucleotide
  modified_base 19: mod_base = OTHER; note = 2'-O-methyl modified nucleotide
  modified_base 20: mod_base = OTHER; note = 2'-O-methyl modified nucleotide with thiophosphate linkage
  modified_base 21: mod_base = OTHER; note = 2'-O-methyl modified nucleotide
gactacccaaatgctggctta

SEQ ID NO: 264 - RNA, 21 nt, synthetic construct
  source 1..21: mol_type = other RNA
  modified_base 1: mod_base = OTHER; note = 2'-O-methyl modified nucleotide with thiophosphate linkage
  modified_base 2: mod_base = OTHER; note = 2'-O-methyl modified nucleotide with thiophosphate linkage
  modified_base 3: mod_base = OTHER; note = 2'-O-methyl modified nucleotide
  modified_base 4: mod_base = OTHER; note = 2'-O-methyl modified nucleotide
  modified_base 5: mod_base = OTHER; note = 2'-O-methyl modified nucleotide
  modified_base 6: mod_base = OTHER; note = 2'-O-methyl modified nucleotide
  modified_base 7: mod_base = OTHER; note = 2'-O-methyl modified nucleotide
  modified_base 8: mod_base = OTHER; note = 2'-O-methyl modified nucleotide
  modified_base 9: mod_base = OTHER; note = 2'-fluoro modified nucleotide
  modified_base 10: mod_base = OTHER; note = 2'-O-methyl modified nucleotide
  modified_base 11: mod_base = OTHER; note = 2'-fluoro modified nucleotide
  modified_base 12: mod_base = OTHER; note = 2'-O-methyl modified nucleotide
  modified_base 13: mod_base = OTHER; note = 2'-fluoro modified nucleotide
  modified_base 14: mod_base = OTHER; note = 2'-O-methyl modified nucleotide
  modified_base 15: mod_base = OTHER; note = 2'-O-methyl modified nucleotide
  modified_base 16: mod_base = OTHER; note = 2'-O-methyl modified nucleotide
  modified_base 17: mod_base = OTHER; note = 2'-O-methyl modified nucleotide
  modified_base 18: mod_base = OTHER; note = 2'-O-methyl modified nucleotide
  modified_base 19: mod_base = OTHER; note = 2'-O-methyl modified nucleotide
  modified_base 20: mod_base = OTHER; note = 2'-O-methyl modified nucleotide with thiophosphate linkage
  modified_base 21: mod_base = OTHER; note = 2'-O-methyl modified nucleotide
gtacccaaatgctggcttgaa

SEQ ID NO: 265 - RNA, 21 nt, synthetic construct
  source 1..21: mol_type = other RNA
  modified_base 1: mod_base = OTHER; note = 2'-O-methyl modified nucleotide with thiophosphate linkage
  modified_base 2: mod_base = OTHER; note = 2'-O-methyl modified nucleotide with thiophosphate linkage
  modified_base 3: mod_base = OTHER; note = 2'-O-methyl modified nucleotide
  modified_base 4: mod_base = OTHER; note = 2'-O-methyl modified nucleotide
  modified_base 5: mod_base = OTHER; note = 2'-O-methyl modified nucleotide
  modified_base 6: mod_base = OTHER; note = 2'-O-methyl modified nucleotide
  modified_base 7: mod_base = OTHER; note = 2'-O-methyl modified nucleotide
  modified_base 8: mod_base = OTHER; note = 2'-O-methyl modified nucleotide
  modified_base 9: mod_base = OTHER; note = 2'-fluoro modified nucleotide
  modified_base 10: mod_base = OTHER; note = 2'-O-methyl modified nucleotide
  modified_base 11: mod_base = OTHER; note = 2'-fluoro modified nucleotide
  modified_base 12: mod_base = OTHER; note = 2'-O-methyl modified nucleotide
  modified_base 13: mod_base = OTHER; note = 2'-fluoro modified nucleotide
  modified_base 14: mod_base = OTHER; note = 2'-O-methyl modified nucleotide
  modified_base 15: mod_base = OTHER; note = 2'-O-methyl modified nucleotide
  modified_base 16: mod_base = OTHER; note = 2'-O-methyl modified nucleotide
  modified_base 17: mod_base = OTHER; note = 2'-O-methyl modified nucleotide
  modified_base 18: mod_base = OTHER; note = 2'-O-methyl modified nucleotide
  modified_base 19: mod_base = OTHER; note = 2'-O-methyl modified nucleotide
  modified_base 20: mod_base = OTHER; note = 2'-O-methyl modified nucleotide with thiophosphate linkage
  modified_base 21: mod_base = OTHER; note = 2'-O-methyl modified nucleotide
gacccaaatgctggcttgata

SEQ ID NO: 266 - RNA, 21 nt, synthetic construct
  source 1..21: mol_type = other RNA
  modified_base 1: mod_base = OTHER; note = 2'-O-methyl modified nucleotide with thiophosphate linkage
  modified_base 2: mod_base = OTHER; note = 2'-O-methyl modified nucleotide with thiophosphate linkage
  modified_base 3: mod_base = OTHER; note = 2'-O-methyl modified nucleotide
  modified_base 4: mod_base = OTHER; note = 2'-O-methyl modified nucleotide
  modified_base 5: mod_base = OTHER; note = 2'-O-methyl modified nucleotide
  modified_base 6: mod_base = OTHER; note = 2'-O-methyl modified nucleotide
  modified_base 7: mod_base = OTHER; note = 2'-O-methyl modified nucleotide
  modified_base 8: mod_base = OTHER; note = 2'-O-methyl modified nucleotide
  modified_base 9: mod_base = OTHER; note = 2'-fluoro modified nucleotide
  modified_base 10: mod_base = OTHER; note = 2'-O-methyl modified nucleotide
  modified_base 11: mod_base = OTHER; note = 2'-fluoro modified nucleotide
  modified_base 12: mod_base = OTHER; note = 2'-O-methyl modified nucleotide
  modified_base 13: mod_base = OTHER; note = 2'-fluoro modified nucleotide
  modified_base 14: mod_base = OTHER; note = 2'-O-methyl modified nucleotide
  modified_base 15: mod_base = OTHER; note = 2'-O-methyl modified nucleotide
  modified_base 16: mod_base = OTHER; note = 2'-O-methyl modified nucleotide
  modified_base 17: mod_base = OTHER; note = 2'-O-methyl modified nucleotide
  modified_base 18: mod_base = OTHER; note = 2'-O-methyl modified nucleotide
  modified_base 19: mod_base = OTHER; note = 2'-O-methyl modified nucleotide
  modified_base 20: mod_base = OTHER; note = 2'-O-methyl modified nucleotide with thiophosphate linkage
  modified_base 21: mod_base = OTHER; note = 2'-O-methyl modified nucleotide
ggctccttattgttatacgaa

SEQ ID NO: 267 - RNA, 21 nt, synthetic construct
  source 1..21: mol_type = other RNA
  modified_base 1: mod_base = OTHER; note = 2'-O-methyl modified nucleotide with thiophosphate linkage
  modified_base 2: mod_base = OTHER; note = 2'-O-methyl modified nucleotide with thiophosphate linkage
  modified_base 3: mod_base = OTHER; note = 2'-O-methyl modified nucleotide
  modified_base 4: mod_base = OTHER; note = 2'-O-methyl modified nucleotide
  modified_base 5: mod_base = OTHER; note = 2'-O-methyl modified nucleotide
  modified_base 6: mod_base = OTHER; note = 2'-O-methyl modified nucleotide
  modified_base 7: mod_base = OTHER; note = 2'-O-methyl modified nucleotide
  modified_base 8: mod_base = OTHER; note = 2'-O-methyl modified nucleotide
  modified_base 9: mod_base = OTHER; note = 2'-fluoro modified nucleotide
  modified_base 10: mod_base = OTHER; note = 2'-O-methyl modified nucleotide
  modified_base 11: mod_base = OTHER; note = 2'-fluoro modified nucleotide
  modified_base 12: mod_base = OTHER; note = 2'-O-methyl modified nucleotide
  modified_base 13: mod_base = OTHER; note = 2'-fluoro modified nucleotide
  modified_base 14: mod_base = OTHER; note = 2'-O-methyl modified nucleotide
  modified_base 15: mod_base = OTHER; note = 2'-O-methyl modified nucleotide
  modified_base 16: mod_base = OTHER; note = 2'-O-methyl modified nucleotide
  modified_base 17: mod_base = OTHER; note = 2'-O-methyl modified nucleotide
  modified_base 18: mod_base = OTHER; note = 2'-O-methyl modified nucleotide
  modified_base 19: mod_base = OTHER; note = 2'-O-methyl modified nucleotide
  modified_base 20: mod_base = OTHER; note = 2'-O-methyl modified nucleotide with thiophosphate linkage
  modified_base 21: mod_base = OTHER; note = 2'-O-methyl modified nucleotide
ggcctagaggctccttccgaa

SEQ ID NO: 268 - RNA, 21 nt, synthetic construct
  source 1..21: mol_type = other RNA
  modified_base 1: mod_base = OTHER; note = 2'-O-methyl modified nucleotide with thiophosphate linkage
  modified_base 2: mod_base = OTHER; note = 2'-O-methyl modified nucleotide with thiophosphate linkage
  modified_base 3: mod_base = OTHER; note = 2'-O-methyl modified nucleotide
  modified_base 4: mod_base = OTHER; note = 2'-O-methyl modified nucleotide
  modified_base 5: mod_base = OTHER; note = 2'-O-methyl modified nucleotide
  modified_base 6: mod_base = OTHER; note = 2'-O-methyl modified nucleotide
  modified_base 7: mod_base = OTHER; note = 2'-O-methyl modified nucleotide
  modified_base 8: mod_base = OTHER; note = 2'-O-methyl modified nucleotide
  modified_base 9: mod_base = OTHER; note = 2'-fluoro modified nucleotide
  modified_base 10: mod_base = OTHER; note = 2'-O-methyl modified nucleotide
  modified_base 11: mod_base = OTHER; note = 2'-fluoro modified nucleotide
  modified_base 12: mod_base = OTHER; note = 2'-O-methyl modified nucleotide
  modified_base 13: mod_base = OTHER; note = 2'-fluoro modified nucleotide
  modified_base 14: mod_base = OTHER; note = 2'-O-methyl modified nucleotide
  modified_base 15: mod_base = OTHER; note = 2'-O-methyl modified nucleotide
  modified_base 16: mod_base = OTHER; note = 2'-O-methyl modified nucleotide
  modified_base 17: mod_base = OTHER; note = 2'-O-methyl modified nucleotide
  modified_base 18: mod_base = OTHER; note = 2'-O-methyl modified nucleotide
  modified_base 19: mod_base = OTHER; note = 2'-O-methyl modified nucleotide
  modified_base 20: mod_base = OTHER; note = 2'-O-methyl modified nucleotide with thiophosphate linkage
  modified_base 21: mod_base = OTHER; note = 2'-O-methyl modified nucleotide
gtagaggctccttccgaacaa

SEQ ID NO: 269 - RNA, 21 nt, synthetic construct
  source 1..21: mol_type = other RNA
  modified_base 1: mod_base = OTHER; note = 2'-O-methyl modified nucleotide with thiophosphate linkage
  modified_base 2: mod_base = OTHER; note = 2'-O-methyl modified nucleotide with thiophosphate linkage
  modified_base 3: mod_base = OTHER; note = 2'-O-methyl modified nucleotide
  modified_base 4: mod_base = OTHER; note = 2'-O-methyl modified nucleotide
  modified_base 5: mod_base = OTHER; note = 2'-O-methyl modified nucleotide
  modified_base 6: mod_base = OTHER; note = 2'-O-methyl modified nucleotide
  modified_base 7: mod_base = OTHER; note = 2'-O-methyl modified nucleotide
  modified_base 8: mod_base = OTHER; note = 2'-O-methyl modified nucleotide
  modified_base 9: mod_base = OTHER; note = 2'-fluoro modified nucleotide
  modified_base 10: mod_base = OTHER; note = 2'-O-methyl modified nucleotide
  modified_base 11: mod_base = OTHER; note = 2'-fluoro modified nucleotide
  modified_base 12: mod_base = OTHER; note = 2'-O-methyl modified nucleotide
  modified_base 13: mod_base = OTHER; note = 2'-fluoro modified nucleotide
  modified_base 14: mod_base = OTHER; note = 2'-O-methyl modified nucleotide
  modified_base 15: mod_base = OTHER; note = 2'-O-methyl modified nucleotide
  modified_base 16: mod_base = OTHER; note = 2'-O-methyl modified nucleotide
  modified_base 17: mod_base = OTHER; note = 2'-O-methyl modified nucleotide
  modified_base 18: mod_base = OTHER; note = 2'-O-methyl modified nucleotide
  modified_base 19: mod_base = OTHER; note = 2'-O-methyl modified nucleotide
  modified_base 20: mod_base = OTHER; note = 2'-O-methyl modified nucleotide with thiophosphate linkage
  modified_base 21: mod_base = OTHER; note = 2'-O-methyl modified nucleotide
gaagcaccgactgagcaaaga

SEQ ID NO: 270 - RNA, 21 nt, synthetic construct
  source 1..21: mol_type = other RNA
  modified_base 1: mod_base = OTHER; note = 2'-O-methyl modified nucleotide with thiophosphate linkage
  modified_base 2: mod_base = OTHER; note = 2'-O-methyl modified nucleotide with thiophosphate linkage
  modified_base 3: mod_base = OTHER; note = 2'-O-methyl modified nucleotide
  modified_base 4: mod_base = OTHER; note = 2'-O-methyl modified nucleotide
  modified_base 5: mod_base = OTHER; note = 2'-O-methyl modified nucleotide
  modified_base 6: mod_base = OTHER; note = 2'-O-methyl modified nucleotide
  modified_base 7: mod_base = OTHER; note = 2'-O-methyl modified nucleotide
  modified_base 8: mod_base = OTHER; note = 2'-O-methyl modified nucleotide
  modified_base 9: mod_base = OTHER; note = 2'-fluoro modified nucleotide
  modified_base 10: mod_base = OTHER; note = 2'-O-methyl modified nucleotide
  modified_base 11: mod_base = OTHER; note = 2'-fluoro modified nucleotide
  modified_base 12: mod_base = OTHER; note = 2'-O-methyl modified nucleotide
  modified_base 13: mod_base = OTHER; note = 2'-fluoro modified nucleotide
  modified_base 14: mod_base = OTHER; note = 2'-O-methyl modified nucleotide
  modified_base 15: mod_base = OTHER; note = 2'-O-methyl modified nucleotide
  modified_base 16: mod_base = OTHER; note = 2'-O-methyl modified nucleotide
  modified_base 17: mod_base = OTHER; note = 2'-O-methyl modified nucleotide
  modified_base 18: mod_base = OTHER; note = 2'-O-methyl modified nucleotide
  modified_base 19: mod_base = OTHER; note = 2'-O-methyl modified nucleotide
  modified_base 20: mod_base = OTHER; note = 2'-O-methyl modified nucleotide with thiophosphate linkage
  modified_base 21: mod_base = OTHER; note = 2'-O-methyl modified nucleotide
cgagtgctaccatggtaatga

SEQ ID NO: 271 - RNA, 21 nt, synthetic construct
  source 1..21: mol_type = other RNA
  modified_base 1: mod_base = OTHER; note = 2'-O-methyl modified nucleotide with thiophosphate linkage
  modified_base 2: mod_base = OTHER; note = 2'-O-methyl modified nucleotide with thiophosphate linkage
  modified_base 3: mod_base = OTHER; note = 2'-O-methyl modified nucleotide
  modified_base 4: mod_base = OTHER; note = 2'-O-methyl modified nucleotide
  modified_base 5: mod_base = OTHER; note = 2'-O-methyl modified nucleotide
  modified_base 6: mod_base = OTHER; note = 2'-O-methyl modified nucleotide
  modified_base 7: mod_base = OTHER; note = 2'-O-methyl modified nucleotide
  modified_base 8: mod_base = OTHER; note = 2'-O-methyl modified nucleotide
  modified_base 9: mod_base = OTHER; note = 2'-fluoro modified nucleotide
  modified_base 10: mod_base = OTHER; note = 2'-O-methyl modified nucleotide
  modified_base 11: mod_base = OTHER; note = 2'-fluoro modified nucleotide
  modified_base 12: mod_base = OTHER; note = 2'-O-methyl modified nucleotide
  modified_base 13: mod_base = OTHER; note = 2'-fluoro modified nucleotide
  modified_base 14: mod_base = OTHER; note = 2'-O-methyl modified nucleotide
  modified_base 15: mod_base = OTHER; note = 2'-O-methyl modified nucleotide
  modified_base 16: mod_base = OTHER; note = 2'-O-methyl modified nucleotide
  modified_base 17: mod_base = OTHER; note = 2'-O-methyl modified nucleotide
  modified_base 18: mod_base = OTHER; note = 2'-O-methyl modified nucleotide
  modified_base 19: mod_base = OTHER; note = 2'-O-methyl modified nucleotide
  modified_base 20: mod_base = OTHER; note = 2'-O-methyl modified nucleotide with thiophosphate linkage
  modified_base 21: mod_base = OTHER; note = 2'-O-methyl modified nucleotide
ggtgctaccatggtaatggaa

SEQ ID NO: 272 - RNA, 21 nt, synthetic construct
  source 1..21: mol_type = other RNA
  modified_base 1: mod_base = OTHER; note = 2'-O-methyl modified nucleotide with thiophosphate linkage
  modified_base 2: mod_base = OTHER; note = 2'-O-methyl modified nucleotide with thiophosphate linkage
  modified_base 3: mod_base = OTHER; note = 2'-O-methyl modified nucleotide
  modified_base 4: mod_base = OTHER; note = 2'-O-methyl modified nucleotide
  modified_base 5: mod_base = OTHER; note = 2'-O-methyl modified nucleotide
  modified_base 6: mod_base = OTHER; note = 2'-O-methyl modified nucleotide
  modified_base 7: mod_base = OTHER; note = 2'-O-methyl modified nucleotide
  modified_base 8: mod_base = OTHER; note = 2'-O-methyl modified nucleotide
  modified_base 9: mod_base = OTHER; note = 2'-fluoro modified nucleotide
  modified_base 10: mod_base = OTHER; note = 2'-O-methyl modified nucleotide
  modified_base 11: mod_base = OTHER; note = 2'-fluoro modified nucleotide
  modified_base 12: mod_base = OTHER; note = 2'-O-methyl modified nucleotide
  modified_base 13: mod_base = OTHER; note = 2'-fluoro modified nucleotide
  modified_base 14: mod_base = OTHER; note = 2'-O-methyl modified nucleotide
  modified_base 15: mod_base = OTHER; note = 2'-O-methyl modified nucleotide
  modified_base 16: mod_base = OTHER; note = 2'-O-methyl modified nucleotide
  modified_base 17: mod_base = OTHER; note = 2'-O-methyl modified nucleotide
  modified_base 18: mod_base = OTHER; note = 2'-O-methyl modified nucleotide
  modified_base 19: mod_base = OTHER; note = 2'-O-methyl modified nucleotide
  modified_base 20: mod_base = OTHER; note = 2'-O-methyl modified nucleotide with thiophosphate linkage
  modified_base 21: mod_base = OTHER; note = 2'-O-methyl modified nucleotide
gaccatggtaatggacagaga

SEQ ID NO: 273 - RNA, 21 nt, synthetic construct
  source 1..21: mol_type = other RNA
  modified_base 1: mod_base = OTHER; note = 2'-O-methyl modified nucleotide with thiophosphate linkage
  modified_base 2: mod_base = OTHER; note = 2'-O-methyl modified nucleotide with thiophosphate linkage
  modified_base 3: mod_base = OTHER; note = 2'-O-methyl modified nucleotide
  modified_base 4: mod_base = OTHER; note = 2'-O-methyl modified nucleotide
  modified_base 5: mod_base = OTHER; note = 2'-O-methyl modified nucleotide
  modified_base 6: mod_base = OTHER; note = 2'-O-methyl modified nucleotide
  modified_base 7: mod_base = OTHER; note = 2'-O-methyl modified nucleotide
  modified_base 8: mod_base = OTHER; note = 2'-O-methyl modified nucleotide
  modified_base 9: mod_base = OTHER; note = 2'-fluoro modified nucleotide
  modified_base 10: mod_base = OTHER; note = 2'-O-methyl modified nucleotide
  modified_base 11: mod_base = OTHER; note = 2'-fluoro modified nucleotide
  modified_base 12: mod_base = OTHER; note = 2'-O-methyl modified nucleotide
  modified_base 13: mod_base = OTHER; note = 2'-fluoro modified nucleotide
  modified_base 14: mod_base = OTHER; note = 2'-O-methyl modified nucleotide
  modified_base 15: mod_base = OTHER; note = 2'-O-methyl modified nucleotide
  modified_base 16: mod_base = OTHER; note = 2'-O-methyl modified nucleotide
  modified_base 17: mod_base = OTHER; note = 2'-O-methyl modified nucleotide
  modified_base 18: mod_base = OTHER; note = 2'-O-methyl modified nucleotide
  modified_base 19: mod_base = OTHER; note = 2'-O-methyl modified nucleotide
  modified_base 20: mod_base = OTHER; note = 2'-O-methyl modified nucleotide with thiophosphate linkage
  modified_base 21: mod_base = OTHER; note = 2'-O-methyl modified nucleotide
gtggtaatggacagagttata

SEQ ID NO: 274 - RNA, 21 nt, synthetic construct
  source 1..21: mol_type = other RNA
  modified_base 1: mod_base = OTHER; note = 2'-O-methyl modified nucleotide with thiophosphate linkage
  modified_base 2: mod_base = OTHER; note = 2'-O-methyl modified nucleotide with thiophosphate linkage
  modified_base 3: mod_base = OTHER; note = 2'-O-methyl modified nucleotide
  modified_base 4: mod_base = OTHER; note = 2'-O-methyl modified nucleotide
  modified_base 5: mod_base = OTHER; note = 2'-O-methyl modified nucleotide
  modified_base 6: mod_base = OTHER; note = 2'-O-methyl modified nucleotide
  modified_base 7: mod_base = OTHER; note = 2'-O-methyl modified nucleotide
  modified_base 8: mod_base = OTHER; note = 2'-O-methyl modified nucleotide
  modified_base 9: mod_base = OTHER; note = 2'-fluoro modified nucleotide
  modified_base 10: mod_base = OTHER; note = 2'-O-methyl modified nucleotide
  modified_base 11: mod_base = OTHER; note = 2'-fluoro modified nucleotide
  modified_base 12: mod_base = OTHER; note = 2'-O-methyl modified nucleotide
  modified_base 13: mod_base = OTHER; note = 2'-fluoro modified nucleotide
  modified_base 14: mod_base = OTHER; note = 2'-O-methyl modified nucleotide
  modified_base 15: mod_base = OTHER; note = 2'-O-methyl modified nucleotide
  modified_base 16: mod_base = OTHER; note = 2'-O-methyl modified nucleotide
  modified_base 17: mod_base = OTHER; note = 2'-O-methyl modified nucleotide
  modified_base 18: mod_base = OTHER; note = 2'-O-methyl modified nucleotide
  modified_base 19: mod_base = OTHER; note = 2'-O-methyl modified nucleotide
  modified_base 20: mod_base = OTHER; note = 2'-O-methyl modified nucleotide with thiophosphate linkage
  modified_base 21: mod_base = OTHER; note = 2'-O-methyl modified nucleotide
gggtaatggacagagttatca

SEQ ID NO: 275 - RNA, 21 nt, synthetic construct
  source 1..21: mol_type = other RNA
  modified_base 1: mod_base = OTHER; note = 2'-O-methyl modified nucleotide with thiophosphate linkage
  modified_base 2: mod_base = OTHER; note = 2'-O-methyl modified nucleotide with thiophosphate linkage
  modified_base 3: mod_base = OTHER; note = 2'-O-methyl modified nucleotide
  modified_base 4: mod_base = OTHER; note = 2'-O-methyl modified nucleotide
  modified_base 5: mod_base = OTHER; note = 2'-O-methyl modified nucleotide
  modified_base 6: mod_base = OTHER; note = 2'-O-methyl modified nucleotide
  modified_base 7: mod_base = OTHER; note = 2'-O-methyl modified nucleotide
  modified_base 8: mod_base = OTHER; note = 2'-O-methyl modified nucleotide
  modified_base 9: mod_base = OTHER; note = 2'-fluoro modified nucleotide
  modified_base 10: mod_base = OTHER; note = 2'-O-methyl modified nucleotide
  modified_base 11: mod_base = OTHER; note = 2'-fluoro modified nucleotide
  modified_base 12: mod_base = OTHER; note = 2'-O-methyl modified nucleotide
  modified_base 13: mod_base = OTHER; note = 2'-fluoro modified nucleotide
  modified_base 14: mod_base = OTHER; note = 2'-O-methyl modified nucleotide
  modified_base 15: mod_base = OTHER; note = 2'-O-methyl modified nucleotide
  modified_base 16: mod_base = OTHER; note = 2'-O-methyl modified nucleotide
  modified_base 17: mod_base = OTHER; note = 2'-O-methyl modified nucleotide
  modified_base 18: mod_base = OTHER; note = 2'-O-methyl modified nucleotide
  modified_base 19: mod_base = OTHER; note = 2'-O-methyl modified nucleotide
  modified_base 20: mod_base = OTHER; note = 2'-O-methyl modified nucleotide with thiophosphate linkage
  modified_base 21: mod_base = OTHER; note = 2'-O-methyl modified nucleotide
ctaatggacagagttatcgaa

SEQ ID NO: 276 - RNA, 21 nt, synthetic construct
  source 1..21: mol_type = other RNA
  modified_base 1: mod_base = OTHER; note = 2'-O-methyl modified nucleotide with thiophosphate linkage
  modified_base 2: mod_base = OTHER; note = 2'-O-methyl modified nucleotide with thiophosphate linkage
  modified_base 3: mod_base = OTHER; note = 2'-O-methyl modified nucleotide
  modified_base 4: mod_base = OTHER; note = 2'-O-methyl modified nucleotide
  modified_base 5: mod_base = OTHER; note = 2'-O-methyl modified nucleotide
  modified_base 6: mod_base = OTHER; note = 2'-O-methyl modified nucleotide
  modified_base 7: mod_base = OTHER; note = 2'-O-methyl modified nucleotide
  modified_base 8: mod_base = OTHER; note = 2'-O-methyl modified nucleotide
  modified_base 9: mod_base = OTHER; note = 2'-fluoro modified nucleotide
  modified_base 10: mod_base = OTHER; note = 2'-O-methyl modified nucleotide
  modified_base 11: mod_base = OTHER; note = 2'-fluoro modified nucleotide
  modified_base 12: mod_base = OTHER; note = 2'-O-methyl modified nucleotide
  modified_base 13: mod_base = OTHER; note = 2'-fluoro modified nucleotide
  modified_base 14: mod_base = OTHER; note = 2'-O-methyl modified nucleotide
  modified_base 15: mod_base = OTHER; note = 2'-O-methyl modified nucleotide
  modified_base 16: mod_base = OTHER; note = 2'-O-methyl modified nucleotide
  modified_base 17: mod_base = OTHER; note = 2'-O-methyl modified nucleotide
  modified_base 18: mod_base = OTHER; note = 2'-O-methyl modified nucleotide
  modified_base 19: mod_base = OTHER; note = 2'-O-methyl modified nucleotide
  modified_base 20: mod_base = OTHER; note = 2'-O-methyl modified nucleotide with thiophosphate linkage
  modified_base 21: mod_base = OTHER; note = 2'-O-methyl modified nucleotide
gagagttatcgaggcacataa

SEQ ID NO: 277 - RNA, 21 nt, synthetic construct
  source 1..21: mol_type = other RNA
  modified_base 1: mod_base = OTHER; note = 2'-O-methyl modified nucleotide with thiophosphate linkage
  modified_base 2: mod_base = OTHER; note = 2'-O-methyl modified nucleotide with thiophosphate linkage
  modified_base 3: mod_base = OTHER; note = 2'-O-methyl modified nucleotide
  modified_base 4: mod_base = OTHER; note = 2'-O-methyl modified nucleotide
  modified_base 5: mod_base = OTHER; note = 2'-O-methyl modified nucleotide
  modified_base 6: mod_base = OTHER; note = 2'-O-methyl modified nucleotide
  modified_base 7: mod_base = OTHER; note = 2'-O-methyl modified nucleotide
  modified_base 8: mod_base = OTHER; note = 2'-O-methyl modified nucleotide
  modified_base 9: mod_base = OTHER; note = 2'-fluoro modified nucleotide
  modified_base 10: mod_base = OTHER; note = 2'-O-methyl modified nucleotide
  modified_base 11: mod_base = OTHER; note = 2'-fluoro modified nucleotide
  modified_base 12: mod_base = OTHER; note = 2'-O-methyl modified nucleotide
  modified_base 13: mod_base = OTHER; note = 2'-fluoro modified nucleotide
  modified_base 14: mod_base = OTHER; note = 2'-O-methyl modified nucleotide
  modified_base 15: mod_base = OTHER; note = 2'-O-methyl modified nucleotide
  modified_base 16: mod_base = OTHER; note = 2'-O-methyl modified nucleotide
  modified_base 17: mod_base = OTHER; note = 2'-O-methyl modified nucleotide
  modified_base 18: mod_base = OTHER; note = 2'-O-methyl modified nucleotide
  modified_base 19: mod_base = OTHER; note = 2'-O-methyl modified nucleotide
  modified_base 20: mod_base = OTHER; note = 2'-O-methyl modified nucleotide with thiophosphate linkage
  modified_base 21: mod_base = OTHER; note = 2'-O-methyl modified nucleotide
cagttatcgaggcacatacta

SEQ ID NO: 278 - RNA, 21 nt, synthetic construct
  source 1..21: mol_type = other RNA
  modified_base 1: mod_base = OTHER; note = 2'-O-methyl modified nucleotide with thiophosphate linkage
  modified_base 2: mod_base = OTHER; note = 2'-O-methyl modified nucleotide with thiophosphate linkage
  modified_base 3: mod_base = OTHER; note = 2'-O-methyl modified nucleotide
  modified_base 4: mod_base = OTHER; note = 2'-O-methyl modified nucleotide
  modified_base 5: mod_base = OTHER; note = 2'-O-methyl modified nucleotide
  modified_base 6: mod_base = OTHER; note = 2'-O-methyl modified nucleotide
  modified_base 7: mod_base = OTHER; note = 2'-O-methyl modified nucleotide
  modified_base 8: mod_base = OTHER; note = 2'-O-methyl modified nucleotide
  modified_base 9: mod_base = OTHER; note = 2'-fluoro modified nucleotide
  modified_base 10: mod_base = OTHER; note = 2'-O-methyl modified nucleotide
  modified_base 11: mod_base = OTHER; note = 2'-fluoro modified nucleotide
  modified_base 12: mod_base = OTHER; note = 2'-O-methyl modified nucleotide
  modified_base 13: mod_base = OTHER; note = 2'-fluoro modified nucleotide
  modified_base 14: mod_base = OTHER; note = 2'-O-methyl modified nucleotide
  modified_base 15: mod_base = OTHER; note = 2'-O-methyl modified nucleotide
  modified_base 16: mod_base = OTHER; note = 2'-O-methyl modified nucleotide
  modified_base 17: mod_base = OTHER; note = 2'-O-methyl modified nucleotide
  modified_base 18: mod_base = OTHER; note = 2'-O-methyl modified nucleotide
  modified_base 19: mod_base = OTHER; note = 2'-O-methyl modified nucleotide
  modified_base 20: mod_base = OTHER; note = 2'-O-methyl modified nucleotide with thiophosphate linkage
  modified_base 21: mod_base = OTHER; note = 2'-O-methyl modified nucleotide
gaccacggtaatggacagaga

SEQ ID NO: 279 - RNA, 21 nt, synthetic construct
  source 1..21: mol_type = other RNA
  modified_base 1: mod_base = OTHER; note = 2'-O-methyl modified nucleotide with thiophosphate linkage
  modified_base 2: mod_base = OTHER; note = 2'-O-methyl modified nucleotide with thiophosphate linkage
  modified_base 3: mod_base = OTHER; note = 2'-O-methyl modified nucleotide
  modified_base 4: mod_base = OTHER; note = 2'-O-methyl modified nucleotide
  modified_base 5: mod_base = OTHER; note = 2'-O-methyl modified nucleotide
  modified_base 6: mod_base = OTHER; note = 2'-O-methyl modified nucleotide
  modified_base 7: mod_base = OTHER; note = 2'-O-methyl modified nucleotide
  modified_base 8: mod_base = OTHER; note = 2'-O-methyl modified nucleotide
  modified_base 9: mod_base = OTHER; note = 2'-fluoro modified nucleotide
  modified_base 10: mod_base = OTHER; note = 2'-O-methyl modified nucleotide
  modified_base 11: mod_base = OTHER; note = 2'-fluoro modified nucleotide
  modified_base 12: mod_base = OTHER; note = 2'-O-methyl modified nucleotide
  modified_base 13: mod_base = OTHER; note = 2'-fluoro modified nucleotide
  modified_base 14: mod_base = OTHER; note = 2'-O-methyl modified nucleotide
  modified_base 15: mod_base = OTHER; note = 2'-O-methyl modified nucleotide
  modified_base 16: mod_base = OTHER; note = 2'-O-methyl modified nucleotide
  modified_base 17: mod_base = OTHER; note = 2'-O-methyl modified nucleotide
  modified_base 18: mod_base = OTHER; note = 2'-O-methyl modified nucleotide
  modified_base 19: mod_base = OTHER; note = 2'-O-methyl modified nucleotide
  modified_base 20: mod_base = OTHER; note = 2'-O-methyl modified nucleotide with thiophosphate linkage
  modified_base 21: mod_base = OTHER; note = 2'-O-methyl modified nucleotide
gactgcaggaatccagatcca

SEQ ID NO: 280 - RNA, 21 nt, synthetic construct
  source 1..21: mol_type = other RNA
  modified_base 1: mod_base = OTHER; note = 2'-O-methyl modified nucleotide with thiophosphate linkage
  modified_base 2: mod_base = OTHER; note = 2'-O-methyl modified nucleotide with thiophosphate linkage
  modified_base 3: mod_base = OTHER; note = 2'-O-methyl modified nucleotide
  modified_base 4: mod_base = OTHER; note = 2'-O-methyl modified nucleotide
  modified_base 5: mod_base = OTHER; note = 2'-O-methyl modified nucleotide
  modified_base 6: mod_base = OTHER; note = 2'-O-methyl modified nucleotide
  modified_base 7: mod_base = OTHER; note = 2'-O-methyl modified nucleotide
  modified_base 8: mod_base = OTHER; note = 2'-O-methyl modified nucleotide
  modified_base 9: mod_base = OTHER; note = 2'-fluoro modified nucleotide
  modified_base 10: mod_base = OTHER; note = 2'-O-methyl modified nucleotide
  modified_base 11: mod_base = OTHER; note = 2'-fluoro modified nucleotide
  modified_base 12: mod_base = OTHER; note = 2'-O-methyl modified nucleotide
  modified_base 13: mod_base = OTHER; note = 2'-fluoro modified nucleotide
  modified_base 14: mod_base = OTHER; note = 2'-O-methyl modified nucleotide
  modified_base 15: mod_base = OTHER; note = 2'-O-methyl modified nucleotide
  modified_base 16: mod_base = OTHER; note = 2'-O-methyl modified nucleotide
  modified_base 17: mod_base = OTHER; note = 2'-O-methyl modified nucleotide
  modified_base 18: mod_base = OTHER; note = 2'-O-methyl modified nucleotide
  modified_base 19: mod_base = OTHER; note = 2'-O-methyl modified nucleotide
  modified_base 20: mod_base = OTHER; note = 2'-O-methyl modified nucleotide with thiophosphate linkage
  modified_base 21: mod_base = OTHER; note = 2'-O-methyl modified nucleotide
gggcagccccttattgttata

SEQ ID NO: 281 - RNA, 21 nt, synthetic construct
  source 1..21: mol_type = other RNA
  modified_base 1: mod_base = OTHER; note = 2'-O-methyl modified nucleotide with thiophosphate linkage
  modified_base 2: mod_base = OTHER; note = 2'-O-methyl modified nucleotide with thiophosphate linkage
  modified_base 3: mod_base = OTHER; note = 2'-O-methyl modified nucleotide
  modified_base 4: mod_base = OTHER; note = 2'-O-methyl modified nucleotide
  modified_base 5: mod_base = OTHER; note = 2'-O-methyl modified nucleotide
  modified_base 6: mod_base = OTHER; note = 2'-O-methyl modified nucleotide
  modified_base 7: mod_base = OTHER; note = 2'-O-methyl modified nucleotide
  modified_base 8: mod_base = OTHER; note = 2'-O-methyl modified nucleotide
  modified_base 9: mod_base = OTHER; note = 2'-fluoro modified nucleotide
  modified_base 10: mod_base = OTHER; note = 2'-O-methyl modified nucleotide
  modified_base 11: mod_base = OTHER; note = 2'-fluoro modified nucleotide
  modified_base 12: mod_base = OTHER; note = 2'-O-methyl modified nucleotide
  modified_base 13: mod_base = OTHER; note = 2'-fluoro modified nucleotide
  modified_base 14: mod_base = OTHER; note = 2'-O-methyl modified nucleotide
  modified_base 15: mod_base = OTHER; note = 2'-O-methyl modified nucleotide
  modified_base 16: mod_base = OTHER; note = 2'-O-methyl modified nucleotide
  modified_base 17: mod_base = OTHER; note = 2'-O-methyl modified nucleotide
  modified_base 18: mod_base = OTHER; note = 2'-O-methyl modified nucleotide
  modified_base 19: mod_base = OTHER; note = 2'-O-methyl modified nucleotide
  modified_base 20: mod_base = OTHER; note = 2'-O-methyl modified nucleotide with thiophosphate linkage
  modified_base 21: mod_base = OTHER; note = 2'-O-methyl modified nucleotide
gagccccttattgttatacga

SEQ ID NO: 282 - RNA, 21 nt, synthetic construct
  source 1..21: mol_type = other RNA
  modified_base 1: mod_base = OTHER; note = 2'-O-methyl modified nucleotide with thiophosphate linkage
  modified_base 2: mod_base = OTHER; note = 2'-O-methyl modified nucleotide with thiophosphate linkage
  modified_base 3: mod_base = OTHER; note = 2'-O-methyl modified nucleotide
  modified_base 4: mod_base = OTHER; note = 2'-O-methyl modified nucleotide
  modified_base 5: mod_base = OTHER; note = 2'-O-methyl modified nucleotide
  modified_base 6: mod_base = OTHER; note = 2'-O-methyl modified nucleotide
  modified_base 7: mod_base = OTHER; note = 2'-O-methyl modified nucleotide
  modified_base 8: mod_base = OTHER; note = 2'-O-methyl modified nucleotide
  modified_base 9: mod_base = OTHER; note = 2'-fluoro modified nucleotide
  modified_base 10: mod_base = OTHER; note = 2'-O-methyl modified nucleotide
  modified_base 11: mod_base = OTHER; note = 2'-fluoro modified nucleotide
  modified_base 12: mod_base = OTHER; note = 2'-O-methyl modified nucleotide
  modified_base 13: mod_base = OTHER; note = 2'-fluoro modified nucleotide
  modified_base 14: mod_base = OTHER; note = 2'-O-methyl modified nucleotide
  modified_base 15: mod_base = OTHER; note = 2'-O-methyl modified nucleotide
  modified_base 16: mod_base = OTHER; note = 2'-O-methyl modified nucleotide
  modified_base 17: mod_base = OTHER; note = 2'-O-methyl modified nucleotide
  modified_base 18: mod_base = OTHER; note = 2'-O-methyl modified nucleotide
  modified_base 19: mod_base = OTHER; note = 2'-O-methyl modified nucleotide
  modified_base 20: mod_base = OTHER; note = 2'-O-methyl modified nucleotide with thiophosphate linkage
  modified_base 21: mod_base = OTHER; note = 2'-O-methyl modified nucleotide
gcagtgtcaggtgggagtaca

SEQ ID NO: 283 - RNA, 21 nt, synthetic construct
  source 1..21: mol_type = other RNA
  modified_base 1: mod_base = OTHER; note = 2'-O-methyl modified nucleotide with thiophosphate linkage
  modified_base 2: mod_base = OTHER; note = 2'-O-methyl modified nucleotide with thiophosphate linkage
  modified_base 3: mod_base = OTHER; note = 2'-O-methyl modified nucleotide
  modified_base 4: mod_base = OTHER; note = 2'-O-methyl modified nucleotide
  modified_base 5: mod_base = OTHER; note = 2'-O-methyl modified nucleotide
  modified_base 6: mod_base = OTHER; note = 2'-O-methyl modified nucleotide
  modified_base 7: mod_base = OTHER; note = 2'-O-methyl modified nucleotide
  modified_base 8: mod_base = OTHER; note = 2'-O-methyl modified nucleotide
  modified_base 9: mod_base = OTHER; note = 2'-fluoro modified nucleotide
  modified_base 10: mod_base = OTHER; note = 2'-O-methyl modified nucleotide
  modified_base 11: mod_base = OTHER; note = 2'-fluoro modified nucleotide
  modified_base 12: mod_base = OTHER; note = 2'-O-methyl modified nucleotide
  modified_base 13: mod_base = OTHER; note = 2'-fluoro modified nucleotide
  modified_base 14: mod_base = OTHER; note = 2'-O-methyl modified nucleotide
  modified_base 15: mod_base = OTHER; note = 2'-O-methyl modified nucleotide
  modified_base 16: mod_base = OTHER; note = 2'-O-methyl modified nucleotide
  modified_base 17: mod_base = OTHER; note = 2'-O-methyl modified nucleotide
  modified_base 18: mod_base = OTHER; note = 2'-O-methyl modified nucleotide
  modified_base 19: mod_base = OTHER; note = 2'-O-methyl modified nucleotide
  modified_base 20: mod_base = OTHER; note = 2'-O-methyl modified nucleotide with thiophosphate linkage
  modified_base 21: mod_base = OTHER; note = 2'-O-methyl modified nucleotide
ctactgcaacctgacacaata

SEQ ID NO: 284 - RNA, 21 nt, synthetic construct
  source 1..21: mol_type = other RNA
  modified_base 1: mod_base = OTHER; note = 2'-O-methyl modified nucleotide with thiophosphate linkage
  modified_base 2: mod_base = OTHER; note = 2'-O-methyl modified nucleotide with thiophosphate linkage
  modified_base 3: mod_base = OTHER; note = 2'-O-methyl modified nucleotide
  modified_base 4: mod_base = OTHER; note = 2'-O-methyl modified nucleotide
  modified_base 5: mod_base = OTHER; note = 2'-O-methyl modified nucleotide
  modified_base 6: mod_base = OTHER; note = 2'-O-methyl modified nucleotide
  modified_base 7: mod_base = OTHER; note = 2'-O-methyl modified nucleotide
  modified_base 8: mod_base = OTHER; note = 2'-O-methyl modified nucleotide
  modified_base 9: mod_base = OTHER; note = 2'-fluoro modified nucleotide
  modified_base 10: mod_base = OTHER; note = 2'-O-methyl modified nucleotide
  modified_base 11: mod_base = OTHER; note = 2'-fluoro modified nucleotide
  modified_base 12: mod_base = OTHER; note = 2'-O-methyl modified nucleotide
  modified_base 13: mod_base = OTHER; note = 2'-fluoro modified nucleotide
  modified_base 14: mod_base = OTHER; note = 2'-O-methyl modified nucleotide
  modified_base 15: mod_base = OTHER; note = 2'-O-methyl modified nucleotide
  modified_base 16: mod_base = OTHER; note = 2'-O-methyl modified nucleotide
  modified_base 17: mod_base = OTHER; note = 2'-O-methyl modified nucleotide
  modified_base 18: mod_base = OTHER; note = 2'-O-methyl modified nucleotide
  modified_base 19: mod_base = OTHER; note = 2'-O-methyl modified nucleotide
  modified_base 20: mod_base = OTHER; note = 2'-O-methyl modified nucleotide with thiophosphate linkage
  modified_base 21: mod_base = OTHER; note = 2'-O-methyl modified nucleotide
ggacacaatgctcagacgcaa

SEQ ID NO: 285 - RNA, 21 nt, synthetic construct
  source 1..21: mol_type = other RNA
  modified_base 1: mod_base = OTHER; note = 2'-O-methyl modified nucleotide with thiophosphate linkage
  modified_base 2: mod_base = OTHER; note = 2'-O-methyl modified nucleotide with thiophosphate linkage
  modified_base 3: mod_base = OTHER; note = 2'-O-methyl modified nucleotide
  modified_base 4: mod_base = OTHER; note = 2'-O-methyl modified nucleotide
  modified_base 5: mod_base = OTHER; note = 2'-O-methyl modified nucleotide
  modified_base 6: mod_base = OTHER; note = 2'-O-methyl modified nucleotide
  modified_base 7: mod_base = OTHER; note = 2'-O-methyl modified nucleotide
  modified_base 8: mod_base = OTHER; note = 2'-O-methyl modified nucleotide
  modified_base 9: mod_base = OTHER; note = 2'-fluoro modified nucleotide
  modified_base 10: mod_base = OTHER; note = 2'-O-methyl modified nucleotide
  modified_base 11: mod_base = OTHER; note = 2'-fluoro modified nucleotide
  modified_base 12: mod_base = OTHER; note = 2'-O-methyl modified nucleotide
  modified_base 13: mod_base = OTHER; note = 2'-fluoro modified nucleotide
  modified_base 14: mod_base = OTHER; note = 2'-O-methyl modified nucleotide
  modified_base 15: mod_base = OTHER; note = 2'-O-methyl modified nucleotide
  modified_base 16: mod_base = OTHER; note = 2'-O-methyl modified nucleotide
  modified_base 17: mod_base = OTHER; note = 2'-O-methyl modified nucleotide
  modified_base 18: mod_base = OTHER; note = 2'-O-methyl modified nucleotide
  modified_base 19: mod_base = OTHER; note = 2'-O-methyl modified nucleotide
  modified_base 20: mod_base = OTHER; note = 2'-O-methyl modified nucleotide with thiophosphate linkage
  modified_base 21: mod_base = OTHER; note = 2'-O-methyl modified nucleotide
gtagaggctccttctgaacaa

SEQ ID NO: 286 - RNA, 21 nt, synthetic construct
  source 1..21: mol_type = other RNA
  modified_base 1: mod_base = OTHER; note = 2'-O-methyl modified nucleotide with thiophosphate linkage
  modified_base 2: mod_base = OTHER; note = 2'-O-methyl modified nucleotide with thiophosphate linkage
  modified_base 3: mod_base = OTHER; note = 2'-O-methyl modified nucleotide
  modified_base 4: mod_base = OTHER; note = 2'-O-methyl modified nucleotide
  modified_base 5: mod_base = OTHER; note = 2'-O-methyl modified nucleotide
  modified_base 6: mod_base = OTHER; note = 2'-O-methyl modified nucleotide
  modified_base 7: mod_base = OTHER; note = 2'-O-methyl modified nucleotide
  modified_base 8: mod_base = OTHER; note = 2'-O-methyl modified nucleotide
  modified_base 9: mod_base = OTHER; note = 2'-fluoro modified nucleotide
  modified_base 10: mod_base = OTHER; note = 2'-O-methyl modified nucleotide
  modified_base 11: mod_base = OTHER; note = 2'-fluoro modified nucleotide
  modified_base 12: mod_base = OTHER; note = 2'-O-methyl modified nucleotide
  modified_base 13: mod_base = OTHER; note = 2'-fluoro modified nucleotide
  modified_base 14: mod_base = OTHER; note = 2'-O-methyl modified nucleotide
  modified_base 15: mod_base = OTHER; note = 2'-O-methyl modified nucleotide
  modified_base 16: mod_base = OTHER; note = 2'-O-methyl modified nucleotide
  modified_base 17: mod_base = OTHER; note = 2'-O-methyl modified nucleotide
  modified_base 18: mod_base = OTHER; note = 2'-O-methyl modified nucleotide
  modified_base 19: mod_base = OTHER; note = 2'-O-methyl modified nucleotide
  modified_base 20: mod_base = OTHER; note = 2'-O-methyl modified nucleotide with thiophosphate linkage
  modified_base 21: mod_base = OTHER; note = 2'-O-methyl modified nucleotide
caggctccttctgaacaagca

SEQ ID NO: 287 - RNA, 21 nt, synthetic construct
  source 1..21: mol_type = other RNA
  modified_base 1: mod_base = OTHER; note = 2'-O-methyl modified nucleotide with thiophosphate linkage
  modified_base 2: mod_base = OTHER; note = 2'-O-methyl modified nucleotide with thiophosphate linkage
  modified_base 3: mod_base = OTHER; note = 2'-O-methyl modified nucleotide
  modified_base 4: mod_base = OTHER; note = 2'-O-methyl modified nucleotide
  modified_base 5: mod_base = OTHER; note = 2'-O-methyl modified nucleotide
  modified_base 6: mod_base = OTHER; note = 2'-O-methyl modified nucleotide
  modified_base 7: mod_base = OTHER; note = 2'-O-methyl modified nucleotide
  modified_base 8: mod_base = OTHER; note = 2'-O-methyl modified nucleotide
  modified_base 9: mod_base = OTHER; note = 2'-fluoro modified nucleotide
  modified_base 10: mod_base = OTHER; note = 2'-O-methyl modified nucleotide
  modified_base 11: mod_base = OTHER; note = 2'-fluoro modified nucleotide
  modified_base 12: mod_base = OTHER; note = 2'-O-methyl modified nucleotide
  modified_base 13: mod_base = OTHER; note = 2'-fluoro modified nucleotide
  modified_base 14: mod_base = OTHER; note = 2'-O-methyl modified nucleotide
  modified_base 15: mod_base = OTHER; note = 2'-O-methyl modified nucleotide
  modified_base 16: mod_base = OTHER; note = 2'-O-methyl modified nucleotide
  modified_base 17: mod_base = OTHER; note = 2'-O-methyl modified nucleotide
  modified_base 18: mod_base = OTHER; note = 2'-O-methyl modified nucleotide
  modified_base 19: mod_base = OTHER; note = 2'-O-methyl modified nucleotide
  modified_base 20: mod_base = OTHER; note = 2'-O-methyl modified nucleotide with thiophosphate linkage
  modified_base 21: mod_base = OTHER; note = 2'-O-methyl modified nucleotide
gaagcaccaactgagcaaaga

SEQ ID NO: 288 - RNA, 21 nt, synthetic construct
  source 1..21: mol_type = other RNA
  modified_base 1: mod_base = OTHER; note = 2'-O-methyl modified nucleotide with thiophosphate linkage
  modified_base 2: mod_base = OTHER; note = 2'-O-methyl modified nucleotide with thiophosphate linkage
  modified_base 3: mod_base = OTHER; note = 2'-O-methyl modified nucleotide
  modified_base 4: mod_base = OTHER; note = 2'-O-methyl modified nucleotide
  modified_base 5: mod_base = OTHER; note = 2'-O-methyl modified nucleotide
  modified_base 6: mod_base = OTHER; note = 2'-O-methyl modified nucleotide
  modified_base 7: mod_base = OTHER; note = 2'-O-methyl modified nucleotide
  modified_base 8: mod_base = OTHER; note = 2'-O-methyl modified nucleotide
  modified_base 9: mod_base = OTHER; note = 2'-fluoro modified nucleotide
  modified_base 10: mod_base = OTHER; note = 2'-O-methyl modified nucleotide
  modified_base 11: mod_base = OTHER; note = 2'-fluoro modified nucleotide
  modified_base 12: mod_base = OTHER; note = 2'-O-methyl modified nucleotide
  modified_base 13: mod_base = OTHER; note = 2'-fluoro modified nucleotide
  modified_base 14: mod_base = OTHER; note = 2'-O-methyl modified nucleotide
  modified_base 15: mod_base = OTHER; note = 2'-O-methyl modified nucleotide
  modified_base 16: mod_base = OTHER; note = 2'-O-methyl modified nucleotide
  modified_base 17: mod_base = OTHER; note = 2'-O-methyl modified nucleotide
  modified_base 18: mod_base = OTHER; note = 2'-O-methyl modified nucleotide
  modified_base 19: mod_base = OTHER; note = 2'-O-methyl modified nucleotide
  modified_base 20: mod_base = OTHER; note = 2'-O-methyl modified nucleotide with thiophosphate linkage
  modified_base 21: mod_base = OTHER; note = 2'-O-methyl modified nucleotide
gggaaatggacagagttatca

SEQ ID NO: 289 - RNA, 21 nt, synthetic construct
  source 1..21: mol_type = other RNA
  modified_base 1: mod_base = OTHER; note = 2'-O-methyl modified nucleotide with thiophosphate linkage
  modified_base 2: mod_base = OTHER; note = 2'-O-methyl modified nucleotide with thiophosphate linkage
  modified_base 3: mod_base = OTHER; note = 2'-O-methyl modified nucleotide
  modified_base 4: mod_base = OTHER; note = 2'-O-methyl modified nucleotide
  modified_base 5: mod_base = OTHER; note = 2'-O-methyl modified nucleotide
  modified_base 6: mod_base = OTHER; note = 2'-O-methyl modified nucleotide
  modified_base 7: mod_base = OTHER; note = 2'-O-methyl modified nucleotide
  modified_base 8: mod_base = OTHER; note = 2'-O-methyl modified nucleotide
  modified_base 9: mod_base = OTHER; note = 2'-fluoro modified nucleotide
  modified_base 10: mod_base = OTHER; note = 2'-O-methyl modified nucleotide
  modified_base 11: mod_base = OTHER; note = 2'-fluoro modified nucleotide
  modified_base 12: mod_base = OTHER; note = 2'-O-methyl modified nucleotide
  modified_base 13: mod_base = OTHER; note = 2'-fluoro modified nucleotide
  modified_base 14: mod_base = OTHER; note = 2'-O-methyl modified nucleotide
  modified_base 15: mod_base = OTHER; note = 2'-O-methyl modified nucleotide
  modified_base 16: mod_base = OTHER; note = 2'-O-methyl modified nucleotide
  modified_base 17: mod_base = OTHER; note = 2'-O-methyl modified nucleotide
  modified_base 18: mod_base = OTHER; note = 2'-O-methyl modified nucleotide
  modified_base 19: mod_base = OTHER; note = 2'-O-methyl modified nucleotide
  modified_base 20: mod_base = OTHER; note = 2'-O-methyl modified nucleotide with thiophosphate linkage
  modified_base 21: mod_base = OTHER; note = 2'-O-methyl modified nucleotide
caaatggacagagttatcaaa

SEQ ID NO: 290 - RNA, 21 nt, synthetic construct
  source 1..21: mol_type = other RNA
  modified_base 1: mod_base = OTHER; note = 2'-O-methyl modified nucleotide with thiophosphate linkage
  modified_base 2: mod_base = OTHER; note = 2'-O-methyl modified nucleotide with thiophosphate linkage
  modified_base 3: mod_base = OTHER; note = 2'-O-methyl modified nucleotide
  modified_base 4: mod_base = OTHER; note = 2'-O-methyl modified nucleotide
  modified_base 5: mod_base = OTHER; note = 2'-O-methyl modified nucleotide
  modified_base 6: mod_base = OTHER; note = 2'-O-methyl modified nucleotide
  modified_base 7: mod_base = OTHER; note = 2'-O-methyl modified nucleotide
  modified_base 8: mod_base = OTHER; note = 2'-O-methyl modified nucleotide
  modified_base 9: mod_base = OTHER; note = 2'-fluoro modified nucleotide
  modified_base 10: mod_base = OTHER; note = 2'-O-methyl modified nucleotide
  modified_base 11: mod_base = OTHER; note = 2'-fluoro modified nucleotide
  modified_base 12: mod_base = OTHER; note = 2'-O-methyl modified nucleotide
  modified_base 13: mod_base = OTHER; note = 2'-fluoro modified nucleotide
  modified_base 14: mod_base = OTHER; note = 2'-O-methyl modified nucleotide
  modified_base 15: mod_base = OTHER; note = 2'-O-methyl modified nucleotide
  modified_base 16: mod_base = OTHER; note = 2'-O-methyl modified nucleotide
  modified_base 17: mod_base = OTHER; note = 2'-O-methyl modified nucleotide
  modified_base 18: mod_base = OTHER; note = 2'-O-methyl modified nucleotide
  modified_base 19: mod_base = OTHER; note = 2'-O-methyl modified nucleotide
  modified_base 20: mod_base = OTHER; note = 2'-O-methyl modified nucleotide with thiophosphate linkage
  modified_base 21: mod_base = OTHER; note = 2'-O-methyl modified nucleotide
gggacagagttatcaaggcaa

SEQ ID NO: 291 - RNA, 21 nt, synthetic construct
  source 1..21: mol_type = other RNA
  modified_base 1: mod_base = OTHER; note = 2'-O-methyl modified nucleotide with thiophosphate linkage
  modified_base 2: mod_base = OTHER; note = 2'-O-methyl modified nucleotide with thiophosphate linkage
  modified_base 3: mod_base = OTHER; note = 2'-O-methyl modified nucleotide
  modified_base 4: mod_base = OTHER; note = 2'-O-methyl modified nucleotide
  modified_base 5: mod_base = OTHER; note = 2'-O-methyl modified nucleotide
  modified_base 6: mod_base = OTHER; note = 2'-O-methyl modified nucleotide
  modified_base 7: mod_base = OTHER; note = 2'-O-methyl modified nucleotide
  modified_base 8: mod_base = OTHER; note = 2'-O-methyl modified nucleotide
  modified_base 9: mod_base = OTHER; note = 2'-fluoro modified nucleotide
  modified_base 10: mod_base = OTHER; note = 2'-O-methyl modified nucleotide
  modified_base 11: mod_base = OTHER; note = 2'-fluoro modified nucleotide
  modified_base 12: mod_base = OTHER; note = 2'-O-methyl modified nucleotide
  modified_base 13: mod_base = OTHER; note = 2'-fluoro modified nucleotide
  modified_base 14: mod_base = OTHER; note = 2'-O-methyl modified nucleotide
  modified_base 15: mod_base = OTHER; note = 2'-O-methyl modified nucleotide
  modified_base 16: mod_base = OTHER; note = 2'-O-methyl modified nucleotide
  modified_base 17: mod_base = OTHER; note = 2'-O-methyl modified nucleotide
  modified_base 18: mod_base = OTHER; note = 2'-O-methyl modified nucleotide
  modified_base 19: mod_base = OTHER; note = 2'-O-methyl modified nucleotide
  modified_base 20: mod_base = OTHER; note = 2'-O-methyl modified nucleotide with thiophosphate linkage
  modified_base 21: mod_base = OTHER; note = 2'-O-methyl modified nucleotide
gtcaagaactactgccgaaaa

SEQ ID NO: 292 - RNA, 21 nt, synthetic construct
  source 1..21: mol_type = other RNA
  modified_base 1: mod_base = OTHER; note = 2'-O-methyl modified nucleotide with thiophosphate linkage
  modified_base 2: mod_base = OTHER; note = 2'-O-methyl modified nucleotide with thiophosphate linkage
  modified_base 3: mod_base = OTHER; note = 2'-O-methyl modified nucleotide
  modified_base 4: mod_base = OTHER; note = 2'-O-methyl modified nucleotide
  modified_base 5: mod_base = OTHER; note = 2'-O-methyl modified nucleotide
  modified_base 6: mod_base = OTHER; note = 2'-O-methyl modified nucleotide
  modified_base 7: mod_base = OTHER; note = 2'-O-methyl modified nucleotide
  modified_base 8: mod_base = OTHER; note = 2'-O-methyl modified nucleotide
  modified_base 9: mod_base = OTHER; note = 2'-fluoro modified nucleotide
  modified_base 10: mod_base = OTHER; note = 2'-O-methyl modified nucleotide
  modified_base 11: mod_base = OTHER; note = 2'-fluoro modified nucleotide
  modified_base 12: mod_base = OTHER; note = 2'-O-methyl modified nucleotide
  modified_base 13: mod_base = OTHER; note = 2'-fluoro modified nucleotide
  modified_base 14: mod_base = OTHER; note = 2'-O-methyl modified nucleotide
  modified_base 15: mod_base = OTHER; note = 2'-O-methyl modified nucleotide
  modified_base 16: mod_base = OTHER; note = 2'-O-methyl modified nucleotide
  modified_base 17: mod_base = OTHER; note = 2'-O-methyl modified nucleotide
  modified_base 18: mod_base = OTHER; note = 2'-O-methyl modified nucleotide
  modified_base 19: mod_base = OTHER; note = 2'-O-methyl modified nucleotide
  modified_base 20: mod_base = OTHER; note = 2'-O-methyl modified nucleotide with thiophosphate linkage
  modified_base 21: mod_base = OTHER; note = 2'-O-methyl modified nucleotide
gcaagaactactgccgaaata

SEQ ID NO: 293 - RNA, 21 nt, synthetic construct
  source 1..21: mol_type = other RNA
  modified_base 1: mod_base = OTHER; note = 2'-O-methyl modified nucleotide with thiophosphate linkage
  modified_base 2: mod_base = OTHER; note = 2'-O-methyl modified nucleotide with thiophosphate linkage
  modified_base 3: mod_base = OTHER; note = 2'-O-methyl modified nucleotide
  modified_base 4: mod_base = OTHER; note = 2'-O-methyl modified nucleotide
  modified_base 5: mod_base = OTHER; note = 2'-O-methyl modified nucleotide
  modified_base 6: mod_base = OTHER; note = 2'-O-methyl modified nucleotide
  modified_base 7: mod_base = OTHER; note = 2'-O-methyl modified nucleotide
  modified_base 8: mod_base = OTHER; note = 2'-O-methyl modified nucleotide
  modified_base 9: mod_base = OTHER; note = 2'-fluoro modified nucleotide
  modified_base 10: mod_base = OTHER; note = 2'-O-methyl modified nucleotide
  modified_base 11: mod_base = OTHER; note = 2'-fluoro modified nucleotide
  modified_base 12: mod_base = OTHER; note = 2'-O-methyl modified nucleotide
  modified_base 13: mod_base = OTHER; note = 2'-fluoro modified nucleotide
  modified_base 14: mod_base = OTHER; note = 2'-O-methyl modified nucleotide
  modified_base 15: mod_base = OTHER; note = 2'-O-methyl modified nucleotide
  modified_base 16: mod_base = OTHER; note = 2'-O-methyl modified nucleotide
  modified_base 17: mod_base = OTHER; note = 2'-O-methyl modified nucleotide
  modified_base 18: mod_base = OTHER; note = 2'-O-methyl modified nucleotide
  modified_base 19: mod_base = OTHER; note = 2'-O-methyl modified nucleotide
  modified_base 20: mod_base = OTHER; note = 2'-O-methyl modified nucleotide with thiophosphate linkage
  modified_base 21: mod_base = OTHER; note = 2'-O-methyl modified nucleotide
gaagaactactgccgaaatca

SEQ ID NO: 294 - RNA, 21 nt, synthetic construct
  source 1..21: mol_type = other RNA
  modified_base 1: mod_base = OTHER; note = 2'-O-methyl modified nucleotide with thiophosphate linkage
  modified_base 2: mod_base = OTHER; note = 2'-O-methyl modified nucleotide with thiophosphate linkage
  modified_base 3: mod_base = OTHER; note = 2'-O-methyl modified nucleotide
  modified_base 4: mod_base = OTHER; note = 2'-O-methyl modified nucleotide
  modified_base 5: mod_base = OTHER; note = 2'-O-methyl modified nucleotide
  modified_base 6: mod_base = OTHER; note = 2'-O-methyl modified nucleotide
  modified_base 7: mod_base = OTHER; note = 2'-O-methyl modified nucleotide
  modified_base 8: mod_base = OTHER; note = 2'-O-methyl modified nucleotide
  modified_base 9: mod_base = OTHER; note = 2'-fluoro modified nucleotide
  modified_base 10: mod_base = OTHER; note = 2'-O-methyl modified nucleotide
  modified_base 11: mod_base = OTHER; note = 2'-fluoro modified nucleotide
  modified_base 12: mod_base = OTHER; note = 2'-O-methyl modified nucleotide
  modified_base 13: mod_base = OTHER; note = 2'-fluoro modified nucleotide
  modified_base 14: mod_base = OTHER; note = 2'-O-methyl modified nucleotide
  modified_base 15: mod_base = OTHER; note = 2'-O-methyl modified nucleotide
  modified_base 16: mod_base = OTHER; note = 2'-O-methyl modified nucleotide
  modified_base 17: mod_base = OTHER; note = 2'-O-methyl modified nucleotide
  modified_base 18: mod_base = OTHER; note = 2'-O-methyl modified nucleotide
  modified_base 19: mod_base = OTHER; note = 2'-O-methyl modified nucleotide
  modified_base 20: mod_base = OTHER; note = 2'-O-methyl modified nucleotide with thiophosphate linkage
  modified_base 21: mod_base = OTHER; note = 2'-O-methyl modified nucleotide
gactgccgaaatccagatcca

SEQ ID NO: 295 - RNA, 21 nt, synthetic construct
  source 1..21: mol_type = other RNA
  modified_base 1: mod_base = OTHER; note = 2'-O-methyl modified nucleotide with thiophosphate linkage
  modified_base 2: mod_base = OTHER; note = 2'-O-methyl modified nucleotide with thiophosphate linkage
  modified_base 3: mod_base = OTHER; note = 2'-O-methyl modified nucleotide
  modified_base 4: mod_base = OTHER; note = 2'-O-methyl modified nucleotide
  modified_base 5: mod_base = OTHER; note = 2'-O-methyl modified nucleotide
  modified_base 6: mod_base = OTHER; note = 2'-O-methyl modified nucleotide
  modified_base 7: mod_base = OTHER; note = 2'-O-methyl modified nucleotide
  modified_base 8: mod_base = OTHER; note = 2'-O-methyl modified nucleotide
  modified_base 9: mod_base = OTHER; note = 2'-fluoro modified nucleotide
  modified_base 10: mod_base = OTHER; note = 2'-O-methyl modified nucleotide
  modified_base 11: mod_base = OTHER; note = 2'-fluoro modified nucleotide
  modified_base 12: mod_base = OTHER; note = 2'-O-methyl modified nucleotide
  modified_base 13: mod_base = OTHER; note = 2'-fluoro modified nucleotide
  modified_base 14: mod_base = OTHER; note = 2'-O-methyl modified nucleotide
  modified_base 15: mod_base = OTHER; note = 2'-O-methyl modified nucleotide
  modified_base 16: mod_base = OTHER; note = 2'-O-methyl modified nucleotide
  modified_base 17: mod_base = OTHER; note = 2'-O-methyl modified nucleotide
  modified_base 18: mod_base = OTHER; note = 2'-O-methyl modified nucleotide
  modified_base 19: mod_base = OTHER; note = 2'-O-methyl modified nucleotide
  modified_base 20: mod_base = OTHER; note = 2'-O-methyl modified nucleotide with thiophosphate linkage
  modified_base 21: mod_base = OTHER; note = 2'-O-methyl modified nucleotide
ctactgcaacctgacacgata

SEQ ID NO: 296 - RNA, 21 nt, synthetic construct
  source 1..21: mol_type = other RNA
  modified_base 1: mod_base = OTHER; note = 2'-O-methyl modified nucleotide with thiophosphate linkage
  modified_base 2: mod_base = OTHER; note = 2'-O-methyl modified nucleotide with thiophosphate linkage
  modified_base 3: mod_base = OTHER; note = 2'-O-methyl modified nucleotide
  modified_base 4: mod_base = OTHER; note = 2'-O-methyl modified nucleotide
  modified_base 5: mod_base = OTHER; note = 2'-O-methyl modified nucleotide
  modified_base 6: mod_base = OTHER; note = 2'-O-methyl modified nucleotide
  modified_base 7: mod_base = OTHER; note = 2'-O-methyl modified nucleotide
  modified_base 8: mod_base = OTHER; note = 2'-O-methyl modified nucleotide
  modified_base 9: mod_base = OTHER; note = 2'-fluoro modified nucleotide
  modified_base 10: mod_base = OTHER; note = 2'-O-methyl modified nucleotide
  modified_base 11: mod_base = OTHER; note = 2'-fluoro modified nucleotide
  modified_base 12: mod_base = OTHER; note = 2'-O-methyl modified nucleotide
  modified_base 13: mod_base = OTHER; note = 2'-fluoro modified nucleotide
  modified_base 14: mod_base = OTHER; note = 2'-O-methyl modified nucleotide
  modified_base 15: mod_base = OTHER; note = 2'-O-methyl modified nucleotide
  modified_base 16: mod_base = OTHER; note = 2'-O-methyl modified nucleotide
  modified_base 17: mod_base = OTHER; note = 2'-O-methyl modified nucleotide
  modified_base 18: mod_base = OTHER; note = 2'-O-methyl modified nucleotide
  modified_base 19: mod_base = OTHER; note = 2'-O-methyl modified nucleotide
  modified_base 20: mod_base = OTHER; note = 2'-O-methyl modified nucleotide with thiophosphate linkage
  modified_base 21: mod_base = OTHER; note = 2'-O-methyl modified nucleotide
ggacacgatgctcagatgcaa

SEQ ID NO: 297 - RNA, 21 nt, synthetic construct
  source 1..21: mol_type = other RNA
  modified_base 1: mod_base = OTHER; note = 2'-O-methyl modified nucleotide with thiophosphate linkage
  modified_base 2: mod_base = OTHER; note = 2'-O-methyl modified nucleotide with thiophosphate linkage
  modified_base 3: mod_base = OTHER; note = 2'-O-methyl modified nucleotide
  modified_base 4: mod_base = OTHER; note = 2'-O-methyl modified nucleotide
  modified_base 5: mod_base = OTHER; note = 2'-O-methyl modified nucleotide
  modified_base 6: mod_base = OTHER; note = 2'-O-methyl modified nucleotide
  modified_base 7: mod_base = OTHER; note = 2'-O-methyl modified nucleotide
  modified_base 8: mod_base = OTHER; note = 2'-O-methyl modified nucleotide
  modified_base 9: mod_base = OTHER; note = 2'-fluoro modified nucleotide
  modified_base 10: mod_base = OTHER; note = 2'-O-methyl modified nucleotide
  modified_base 11: mod_base = OTHER; note = 2'-fluoro modified nucleotide
  modified_base 12: mod_base = OTHER; note = 2'-O-methyl modified nucleotide
  modified_base 13: mod_base = OTHER; note = 2'-fluoro modified nucleotide
  modified_base 14: mod_base = OTHER; note = 2'-O-methyl modified nucleotide
  modified_base 15: mod_base = OTHER; note = 2'-O-methyl modified nucleotide
  modified_base 16: mod_base = OTHER; note = 2'-O-methyl modified nucleotide
  modified_base 17: mod_base = OTHER; note = 2'-O-methyl modified nucleotide
  modified_base 18: mod_base = OTHER; note = 2'-O-methyl modified nucleotide
  modified_base 19: mod_base = OTHER; note = 2'-O-methyl modified nucleotide
  modified_base 20: mod_base = OTHER; note = 2'-O-methyl modified nucleotide with thiophosphate linkage
  modified_base 21: mod_base = OTHER; note = 2'-O-methyl modified nucleotide
cgactgctactaccattatga

SEQ ID NO: 298 - RNA, 21 nt, synthetic construct
  source 1..21: mol_type = other RNA
  modified_base 1: mod_base = OTHER; note = 2'-O-methyl modified nucleotide with thiophosphate linkage
  modified_base 2: mod_base = OTHER; note = 2'-O-methyl modified nucleotide with thiophosphate linkage
  modified_base 3: mod_base = OTHER; note = 2'-O-methyl modified nucleotide
  modified_base 4: mod_base = OTHER; note = 2'-O-methyl modified nucleotide
  modified_base 5: mod_base = OTHER; note = 2'-O-methyl modified nucleotide
  modified_base 6: mod_base = OTHER; note = 2'-O-methyl modified nucleotide
  modified_base 7: mod_base = OTHER; note = 2'-O-methyl modified nucleotide
  modified_base 8: mod_base = OTHER; note = 2'-O-methyl modified nucleotide
  modified_base 9: mod_base = OTHER; note = 2'-fluoro modified nucleotide
  modified_base 10: mod_base = OTHER; note = 2'-O-methyl modified nucleotide
  modified_base 11: mod_base = OTHER; note = 2'-fluoro modified nucleotide
  modified_base 12: mod_base = OTHER; note = 2'-O-methyl modified nucleotide
  modified_base 13: mod_base = OTHER; note = 2'-fluoro modified nucleotide
  modified_base 14: mod_base = OTHER; note = 2'-O-methyl modified nucleotide
  modified_base 15: mod_base = OTHER; note = 2'-O-methyl modified nucleotide
  modified_base 16: mod_base = OTHER; note = 2'-O-methyl modified nucleotide
  modified_base 17: mod_base = OTHER; note = 2'-O-methyl modified nucleotide
  modified_base 18: mod_base = OTHER; note = 2'-O-methyl modified nucleotide
  modified_base 19: mod_base = OTHER; note = 2'-O-methyl modified nucleotide
  modified_base 20: mod_base = OTHER; note = 2'-O-methyl modified nucleotide with thiophosphate linkage
  modified_base 21: mod_base = OTHER; note = 2'-O-methyl modified nucleotide
cactgctactaccattatgga

SEQ ID NO: 299 - RNA, 21 nt, synthetic construct
  source 1..21: mol_type = other RNA
  modified_base 1: mod_base = OTHER; note = 2'-O-methyl modified nucleotide with thiophosphate linkage
  modified_base 2: mod_base = OTHER; note = 2'-O-methyl modified nucleotide with thiophosphate linkage
  modified_base 3: mod_base = OTHER; note = 2'-O-methyl modified nucleotide
  modified_base 4: mod_base = OTHER; note = 2'-O-methyl modified nucleotide
  modified_base 5: mod_base = OTHER; note = 2'-O-methyl modified nucleotide
  modified_base 6: mod_base = OTHER; note = 2'-O-methyl modified nucleotide
  modified_base 7: mod_base = OTHER; note = 2'-O-methyl modified nucleotide
  modified_base 8: mod_base = OTHER; note = 2'-O-methyl modified nucleotide
  modified_base 9: mod_base = OTHER; note = 2'-fluoro modified nucleotide
  modified_base 10: mod_base = OTHER; note = 2'-O-methyl modified nucleotide
  modified_base 11: mod_base = OTHER; note = 2'-fluoro modified nucleotide
  modified_base 12: mod_base = OTHER; note = 2'-O-methyl modified nucleotide
  modified_base 13: mod_base = OTHER; note = 2'-fluoro modified nucleotide
  modified_base 14: mod_base = OTHER; note = 2'-O-methyl modified nucleotide
  modified_base 15: mod_base = OTHER; note = 2'-O-methyl modified nucleotide
  modified_base 16: mod_base = OTHER; note = 2'-O-methyl modified nucleotide
  modified_base 17: mod_base = OTHER; note = 2'-O-methyl modified nucleotide
  modified_base 18: mod_base = OTHER; note = 2'-O-methyl modified nucleotide
  modified_base 19: mod_base = OTHER; note = 2'-O-methyl modified nucleotide
  modified_base 20: mod_base = OTHER; note = 2'-O-methyl modified nucleotide with thiophosphate linkage
  modified_base 21: mod_base = OTHER; note = 2'-O-methyl modified nucleotide
gctgctactaccattatggaa

SEQ ID NO: 300 - RNA, 21 nt, synthetic construct
  source 1..21: mol_type = other RNA
  modified_base 1: mod_base = OTHER; note = 2'-O-methyl modified nucleotide with thiophosphate linkage
  modified_base 2: mod_base = OTHER; note = 2'-O-methyl modified nucleotide with thiophosphate linkage
  modified_base 3: mod_base = OTHER; note = 2'-O-methyl modified nucleotide
  modified_base 4: mod_base = OTHER; note = 2'-O-methyl modified nucleotide
  modified_base 5: mod_base = OTHER; note = 2'-O-methyl modified nucleotide
  modified_base 6: mod_base = OTHER; note = 2'-O-methyl modified nucleotide
  modified_base 7: mod_base = OTHER; note = 2'-O-methyl modified nucleotide
  modified_base 8: mod_base = OTHER; note = 2'-O-methyl modified nucleotide
  modified_base 9: mod_base = OTHER; note = 2'-fluoro modified nucleotide
  modified_base 10: mod_base = OTHER; note = 2'-O-methyl modified nucleotide
  modified_base 11: mod_base = OTHER; note = 2'-fluoro modified nucleotide
  modified_base 12: mod_base = OTHER; note = 2'-O-methyl modified nucleotide
  modified_base 13: mod_base = OTHER; note = 2'-fluoro modified nucleotide
  modified_base 14: mod_base = OTHER; note = 2'-O-methyl modified nucleotide
  modified_base 15: mod_base = OTHER; note = 2'-O-methyl modified nucleotide
  modified_base 16: mod_base = OTHER; note = 2'-O-methyl modified nucleotide
  modified_base 17: mod_base = OTHER; note = 2'-O-methyl modified nucleotide
  modified_base 18: mod_base = OTHER; note = 2'-O-methyl modified nucleotide
  modified_base 19: mod_base = OTHER; note = 2'-O-methyl modified nucleotide
  modified_base 20: mod_base = OTHER; note = 2'-O-methyl modified nucleotide with thiophosphate linkage
  modified_base 21: mod_base = OTHER; note = 2'-O-methyl modified nucleotide
gactaccattatggacagaga

SEQ ID NO: 301 - RNA, 21 nt, synthetic construct
  source 1..21: mol_type = other RNA
  modified_base 1: mod_base = OTHER; note = 2'-O-methyl modified nucleotide with thiophosphate linkage
  modified_base 2: mod_base = OTHER; note = 2'-O-methyl modified nucleotide with thiophosphate linkage
  modified_base 3: mod_base = OTHER; note = 2'-O-methyl modified nucleotide
  modified_base 4: mod_base = OTHER; note = 2'-O-methyl modified nucleotide
  modified_base 5: mod_base = OTHER; note = 2'-O-methyl modified nucleotide
  modified_base 6: mod_base = OTHER; note = 2'-O-methyl modified nucleotide
  modified_base 7: mod_base = OTHER; note = 2'-O-methyl modified nucleotide
  modified_base 8: mod_base = OTHER; note = 2'-O-methyl modified nucleotide
  modified_base 9: mod_base = OTHER; note = 2'-fluoro modified nucleotide
  modified_base 10: mod_base = OTHER; note = 2'-O-methyl modified nucleotide
  modified_base 11: mod_base = OTHER; note = 2'-fluoro modified nucleotide
  modified_base 12: mod_base = OTHER; note = 2'-O-methyl modified nucleotide
  modified_base 13: mod_base = OTHER; note = 2'-fluoro modified nucleotide
  modified_base 14: mod_base = OTHER; note = 2'-O-methyl modified nucleotide
  modified_base 15: mod_base = OTHER; note = 2'-O-methyl modified nucleotide
  modified_base 16: mod_base = OTHER; note = 2'-O-methyl modified nucleotide
  modified_base 17: mod_base = OTHER; note = 2'-O-methyl modified nucleotide
  modified_base 18: mod_base = OTHER; note = 2'-O-methyl modified nucleotide
  modified_base 19: mod_base = OTHER; note = 2'-O-methyl modified nucleotide
  modified_base 20: mod_base = OTHER; note = 2'-O-methyl modified nucleotide with thiophosphate linkage
  modified_base 21: mod_base = OTHER; note = 2'-O-methyl modified nucleotide
gcttgccaagcttggtcatca

SEQ ID NO: 302 - RNA, 21 nt, synthetic construct
  source 1..21: mol_type = other RNA
  modified_base 1: mod_base = OTHER; note = 2'-O-methyl modified nucleotide with thiophosphate linkage
  modified_base 2: mod_base = OTHER; note = 2'-O-methyl modified nucleotide with thiophosphate linkage
  modified_base 3: mod_base = OTHER; note = 2'-O-methyl modified nucleotide
  modified_base 4: mod_base = OTHER; note = 2'-O-methyl modified nucleotide
  modified_base 5: mod_base = OTHER; note = 2'-O-methyl modified nucleotide
  modified_base 6: mod_base = OTHER; note = 2'-O-methyl modified nucleotide
  modified_base 7: mod_base = OTHER; note = 2'-O-methyl modified nucleotide
  modified_base 8: mod_base = OTHER; note = 2'-O-methyl modified nucleotide
  modified_base 9: mod_base = OTHER; note = 2'-fluoro modified nucleotide
  modified_base 10: mod_base = OTHER; note = 2'-O-methyl modified nucleotide
  modified_base 11: mod_base = OTHER; note = 2'-fluoro modified nucleotide
  modified_base 12: mod_base = OTHER; note = 2'-O-methyl modified nucleotide
  modified_base 13: mod_base = OTHER; note = 2'-fluoro modified nucleotide
  modified_base 14: mod_base = OTHER; note = 2'-O-methyl modified nucleotide
  modified_base 15: mod_base = OTHER; note = 2'-O-methyl modified nucleotide
  modified_base 16: mod_base = OTHER; note = 2'-O-methyl modified nucleotide
  modified_base 17: mod_base = OTHER; note = 2'-O-methyl modified nucleotide
  modified_base 18: mod_base = OTHER; note = 2'-O-methyl modified nucleotide
  modified_base 19: mod_base = OTHER; note = 2'-O-methyl modified nucleotide
  modified_base 20: mod_base = OTHER; note = 2'-O-methyl modified nucleotide with thiophosphate linkage
  modified_base 21: mod_base = OTHER; note = 2'-O-methyl modified nucleotide
gttgccaagcttggtcatcta

SEQ ID NO: 303 - RNA, 21 nt, synthetic construct
  source 1..21: mol_type = other RNA
  modified_base 1: mod_base = OTHER; note = 2'-O-methyl modified nucleotide with thiophosphate linkage
  modified_base 2: mod_base = OTHER; note = 2'-O-methyl modified nucleotide with thiophosphate linkage
  modified_base 3: mod_base = OTHER; note = 2'-O-methyl modified nucleotide
  modified_base 4: mod_base = OTHER; note = 2'-O-methyl modified nucleotide
  modified_base 5: mod_base = OTHER; note = 2'-O-methyl modified nucleotide
  modified_base 6: mod_base = OTHER; note = 2'-O-methyl modified nucleotide
  modified_base 7: mod_base = OTHER; note = 2'-O-methyl modified nucleotide
  modified_base 8: mod_base = OTHER; note = 2'-O-methyl modified nucleotide
  modified_base 9: mod_base = OTHER; note = 2'-fluoro modified nucleotide
  modified_base 10: mod_base = OTHER; note = 2'-O-methyl modified nucleotide
  modified_base 11: mod_base = OTHER; note = 2'-fluoro modified nucleotide
  modified_base 12: mod_base = OTHER; note = 2'-O-methyl modified nucleotide
  modified_base 13: mod_base = OTHER; note = 2'-fluoro modified nucleotide
  modified_base 14: mod_base = OTHER; note = 2'-O-methyl modified nucleotide
  modified_base 15: mod_base = OTHER; note = 2'-O-methyl modified nucleotide
  modified_base 16: mod_base = OTHER; note = 2'-O-methyl modified nucleotide
  modified_base 17: mod_base = OTHER; note = 2'-O-methyl modified nucleotide
  modified_base 18: mod_base = OTHER; note = 2'-O-methyl modified nucleotide
  modified_base 19: mod_base = OTHER; note = 2'-O-methyl modified nucleotide
  modified_base 20: mod_base = OTHER; note = 2'-O-methyl modified nucleotide with thiophosphate linkage
  modified_base 21: mod_base = OTHER; note = 2'-O-methyl modified nucleotide
gatagtcggaccccagaaaaa

SEQ ID NO: 304 - RNA, 21 nt, synthetic construct
  source 1..21: mol_type = other RNA
  modified_base 1: mod_base = OTHER; note = 2'-O-methyl modified nucleotide with thiophosphate linkage
  modified_base 2: mod_base = OTHER; note = 2'-O-methyl modified nucleotide with thiophosphate linkage
  modified_base 3: mod_base = OTHER; note = 2'-O-methyl modified nucleotide
  modified_base 4: mod_base = OTHER; note = 2'-O-methyl modified nucleotide
  modified_base 5: mod_base = OTHER; note = 2'-O-methyl modified nucleotide
  modified_base 6: mod_base = OTHER; note = 2'-O-methyl modified nucleotide
  modified_base 7: mod_base = OTHER; note = 2'-O-methyl modified nucleotide
  modified_base 8: mod_base = OTHER; note = 2'-O-methyl modified nucleotide
  modified_base 9: mod_base = OTHER; note = 2'-fluoro modified nucleotide
  modified_base 10: mod_base = OTHER; note = 2'-O-methyl modified nucleotide
  modified_base 11: mod_base = OTHER; note = 2'-fluoro modified nucleotide
  modified_base 12: mod_base = OTHER; note = 2'-O-methyl modified nucleotide
  modified_base 13: mod_base = OTHER; note = 2'-fluoro modified nucleotide
  modified_base 14: mod_base = OTHER; note = 2'-O-methyl modified nucleotide
  modified_base 15: mod_base = OTHER; note = 2'-O-methyl modified nucleotide
  modified_base 16: mod_base = OTHER; note = 2'-O-methyl modified nucleotide
  modified_base 17: mod_base = OTHER; note = 2'-O-methyl modified nucleotide
  modified_base 18: mod_base = OTHER; note = 2'-O-methyl modified nucleotide
  modified_base 19: mod_base = OTHER; note = 2'-O-methyl modified nucleotide
  modified_base 20: mod_base = OTHER; note = 2'-O-methyl modified nucleotide with thiophosphate linkage
  modified_base 21: mod_base = OTHER; note = 2'-O-methyl modified nucleotide
gcaggaactactgcaggaata

SEQ ID NO: 305 - RNA, 21 nt, synthetic construct
  source 1..21: mol_type = other RNA
  modified_base 1: mod_base = OTHER; note = 2'-O-methyl modified nucleotide with thiophosphate linkage
  modified_base 2: mod_base = OTHER; note = 2'-O-methyl modified nucleotide with thiophosphate linkage
  modified_base 3: mod_base = OTHER; note = 2'-O-methyl modified nucleotide
  modified_base 4: mod_base = OTHER; note = 2'-O-methyl modified nucleotide
  modified_base 5: mod_base = OTHER; note = 2'-O-methyl modified nucleotide
  modified_base 6: mod_base = OTHER; note = 2'-O-methyl modified nucleotide
  modified_base 7: mod_base = OTHER; note = 2'-O-methyl modified nucleotide
  modified_base 8: mod_base = OTHER; note = 2'-O-methyl modified nucleotide
  modified_base 9: mod_base = OTHER; note = 2'-fluoro modified nucleotide
  modified_base 10: mod_base = OTHER; note = 2'-O-methyl modified nucleotide
  modified_base 11: mod_base = OTHER; note = 2'-fluoro modified nucleotide
  modified_base 12: mod_base = OTHER; note = 2'-O-methyl modified nucleotide
  modified_base 13: mod_base = OTHER; note = 2'-fluoro modified nucleotide
  modified_base 14: mod_base = OTHER; note = 2'-O-methyl modified nucleotide
  modified_base 15: mod_base = OTHER; note = 2'-O-methyl modified nucleotide
  modified_base 16: mod_base = OTHER; note = 2'-O-methyl modified nucleotide
  modified_base 17: mod_base = OTHER; note = 2'-O-methyl modified nucleotide
  modified_base 18: mod_base = OTHER; note = 2'-O-methyl modified nucleotide
  modified_base 19: mod_base = OTHER; note = 2'-O-methyl modified nucleotide
  modified_base 20: mod_base = OTHER; note = 2'-O-methyl modified nucleotide with thiophosphate linkage
  modified_base 21: mod_base = OTHER; note = 2'-O-methyl modified nucleotide
caatccagatgctgagattca

SEQ ID NO: 306 - RNA, 21 nt, synthetic construct
  source 1..21: mol_type = other RNA
  modified_base 1: mod_base = OTHER; note = 2'-O-methyl modified nucleotide with thiophosphate linkage
  modified_base 2: mod_base = OTHER; note = 2'-O-methyl modified nucleotide with thiophosphate linkage
  modified_base 3: mod_base = OTHER; note = 2'-O-methyl modified nucleotide
  modified_base 4: mod_base = OTHER; note = 2'-O-methyl modified nucleotide
  modified_base 5: mod_base = OTHER; note = 2'-O-methyl modified nucleotide
  modified_base 6: mod_base = OTHER; note = 2'-O-methyl modified nucleotide
  modified_base 7: mod_base = OTHER; note = 2'-O-methyl modified nucleotide
  modified_base 8: mod_base = OTHER; note = 2'-O-methyl modified nucleotide
  modified_base 9: mod_base = OTHER; note = 2'-fluoro modified nucleotide
  modified_base 10: mod_base = OTHER; note = 2'-O-methyl modified nucleotide
  modified_base 11: mod_base = OTHER; note = 2'-fluoro modified nucleotide
  modified_base 12: mod_base = OTHER; note = 2'-O-methyl modified nucleotide
  modified_base 13: mod_base = OTHER; note = 2'-fluoro modified nucleotide
  modified_base 14: mod_base = OTHER; note = 2'-O-methyl modified nucleotide
  modified_base 15: mod_base = OTHER; note = 2'-O-methyl modified nucleotide
  modified_base 16: mod_base = OTHER; note = 2'-O-methyl modified nucleotide
  modified_base 17: mod_base = OTHER; note = 2'-O-methyl modified nucleotide
  modified_base 18: mod_base = OTHER; note = 2'-O-methyl modified nucleotide
  modified_base 19: mod_base = OTHER; note = 2'-O-methyl modified nucleotide
  modified_base 20: mod_base = OTHER; note = 2'-O-methyl modified nucleotide with thiophosphate linkage
  modified_base 21: mod_base = OTHER; note = 2'-O-methyl modified nucleotide
cagattcgcccttggtgttaa

SEQ ID NO: 307 - RNA, 21 nt, synthetic construct
  source 1..21: mol_type = other RNA
  modified_base 1: mod_base = OTHER; note = 2'-O-methyl modified nucleotide with thiophosphate linkage
  modified_base 2: mod_base = OTHER; note = 2'-O-methyl modified nucleotide with thiophosphate linkage
  modified_base 3: mod_base = OTHER; note = 2'-O-methyl modified nucleotide
  modified_base 4: mod_base = OTHER; note = 2'-O-methyl modified nucleotide
  modified_base 5: mod_base = OTHER; note = 2'-O-methyl modified nucleotide
  modified_base 6: mod_base = OTHER; note = 2'-O-methyl modified nucleotide
  modified_base 7: mod_base = OTHER; note = 2'-O-methyl modified nucleotide
  modified_base 8: mod_base = OTHER; note = 2'-O-methyl modified nucleotide
  modified_base 9: mod_base = OTHER; note = 2'-fluoro modified nucleotide
  modified_base 10: mod_base = OTHER; note = 2'-O-methyl modified nucleotide
  modified_base 11: mod_base = OTHER; note = 2'-fluoro modified nucleotide
  modified_base 12: mod_base = OTHER; note = 2'-O-methyl modified nucleotide
  modified_base 13: mod_base = OTHER; note = 2'-fluoro modified nucleotide
  modified_base 14: mod_base = OTHER; note = 2'-O-methyl modified nucleotide
  modified_base 15: mod_base = OTHER; note = 2'-O-methyl modified nucleotide
  modified_base 16: mod_base = OTHER; note = 2'-O-methyl modified nucleotide
  modified_base 17: mod_base = OTHER; note = 2'-O-methyl modified nucleotide
  modified_base 18: mod_base = OTHER; note = 2'-O-methyl modified nucleotide
  modified_base 19: mod_base = OTHER; note = 2'-O-methyl modified nucleotide
  modified_base 20: mod_base = OTHER; note = 2'-O-methyl modified nucleotide with thiophosphate linkage
  modified_base 21: mod_base = OTHER; note = 2'-O-methyl modified nucleotide
ccccttggtgttacaccatga

SEQ ID NO: 308 - RNA, 21 nt, synthetic construct
  source 1..21: mol_type = other RNA
  modified_base 1: mod_base = OTHER; note = 2'-O-methyl modified nucleotide with thiophosphate linkage
  modified_base 2: mod_base = OTHER; note = 2'-O-methyl modified nucleotide with thiophosphate linkage
  modified_base 3: mod_base = OTHER; note = 2'-O-methyl modified nucleotide
  modified_base 4: mod_base = OTHER; note = 2'-O-methyl modified nucleotide
  modified_base 5: mod_base = OTHER; note = 2'-O-methyl modified nucleotide
  modified_base 6: mod_base = OTHER; note = 2'-O-methyl modified nucleotide
  modified_base 7: mod_base = OTHER; note = 2'-O-methyl modified nucleotide
  modified_base 8: mod_base = OTHER; note = 2'-O-methyl modified nucleotide
  modified_base 9: mod_base = OTHER; note = 2'-fluoro modified nucleotide
  modified_base 10: mod_base = OTHER; note = 2'-O-methyl modified nucleotide
  modified_base 11: mod_base = OTHER; note = 2'-fluoro modified nucleotide
  modified_base 12: mod_base = OTHER; note = 2'-O-methyl modified nucleotide
  modified_base 13: mod_base = OTHER; note = 2'-fluoro modified nucleotide
  modified_base 14: mod_base = OTHER; note = 2'-O-methyl modified nucleotide
  modified_base 15: mod_base = OTHER; note = 2'-O-methyl modified nucleotide
  modified_base 16: mod_base = OTHER; note = 2'-O-methyl modified nucleotide
  modified_base 17: mod_base = OTHER; note = 2'-O-methyl modified nucleotide
  modified_base 18: mod_base = OTHER; note = 2'-O-methyl modified nucleotide
  modified_base 19: mod_base = OTHER; note = 2'-O-methyl modified nucleotide
  modified_base 20: mod_base = OTHER; note = 2'-O-methyl modified nucleotide with thiophosphate linkage
  modified_base 21: mod_base = OTHER; note = 2'-O-methyl modified nucleotide
gtggtgacagaatcaagtgta

SEQ ID NO: 309 - RNA, 21 nt, synthetic construct
  source 1..21: mol_type = other RNA
  modified_base 1: mod_base = OTHER; note = 2'-O-methyl modified nucleotide with thiophosphate linkage
  modified_base 2: mod_base = OTHER; note = 2'-O-methyl modified nucleotide with thiophosphate linkage
  modified_base 3: mod_base = OTHER; note = 2'-O-methyl modified nucleotide
  modified_base 4: mod_base = OTHER; note = 2'-O-methyl modified nucleotide
  modified_base 5: mod_base = OTHER; note = 2'-O-methyl modified nucleotide
  modified_base 6: mod_base = OTHER; note = 2'-O-methyl modified nucleotide
  modified_base 7: mod_base = OTHER; note = 2'-O-methyl modified nucleotide
  modified_base 8: mod_base = OTHER; note = 2'-O-methyl modified nucleotide
  modified_base 9: mod_base = OTHER; note = 2'-fluoro modified nucleotide
  modified_base 10: mod_base = OTHER; note = 2'-O-methyl modified nucleotide
  modified_base 11: mod_base = OTHER; note = 2'-fluoro modified nucleotide
  modified_base 12: mod_base = OTHER; note = 2'-O-methyl modified nucleotide
  modified_base 13: mod_base = OTHER; note = 2'-fluoro modified nucleotide
  modified_base 14: mod_base = OTHER; note = 2'-O-methyl modified nucleotide
  modified_base 15: mod_base = OTHER; note = 2'-O-methyl modified nucleotide
  modified_base 16: mod_base = OTHER; note = 2'-O-methyl modified nucleotide
  modified_base 17: mod_base = OTHER; note = 2'-O-methyl modified nucleotide
  modified_base 18: mod_base = OTHER; note = 2'-O-methyl modified nucleotide
  modified_base 19: mod_base = OTHER; note = 2'-O-methyl modified nucleotide
  modified_base 20: mod_base = OTHER; note = 2'-O-methyl modified nucleotide with thiophosphate linkage
  modified_base 21: mod_base = OTHER; note = 2'-O-methyl modified nucleotide
gatcaagtgtccttgcaacta

SEQ ID NO: 310 - RNA, 21 nt, synthetic construct
  source 1..21: mol_type = other RNA
  modified_base 1: mod_base = OTHER; note = 2'-O-methyl modified nucleotide with thiophosphate linkage
  modified_base 2: mod_base = OTHER; note = 2'-O-methyl modified nucleotide with thiophosphate linkage
  modified_base 3: mod_base = OTHER; note = 2'-O-methyl modified nucleotide
  modified_base 4: mod_base = OTHER; note = 2'-O-methyl modified nucleotide
  modified_base 5: mod_base = OTHER; note = 2'-O-methyl modified nucleotide
  modified_base 6: mod_base = OTHER; note = 2'-O-methyl modified nucleotide
  modified_base 7: mod_base = OTHER; note = 2'-O-methyl modified nucleotide
  modified_base 8: mod_base = OTHER; note = 2'-O-methyl modified nucleotide
  modified_base 9: mod_base = OTHER; note = 2'-fluoro modified nucleotide
  modified_base 10: mod_base = OTHER; note = 2'-O-methyl modified nucleotide
  modified_base 11: mod_base = OTHER; note = 2'-fluoro modified nucleotide
  modified_base 12: mod_base = OTHER; note = 2'-O-methyl modified nucleotide
  modified_base 13: mod_base = OTHER; note = 2'-fluoro modified nucleotide
  modified_base 14: mod_base = OTHER; note = 2'-O-methyl modified nucleotide
  modified_base 15: mod_base = OTHER; note = 2'-O-methyl modified nucleotide
  modified_base 16: mod_base = OTHER; note = 2'-O-methyl modified nucleotide
  modified_base 17: mod_base = OTHER; note = 2'-O-methyl modified nucleotide
  modified_base 18: mod_base = OTHER; note = 2'-O-methyl modified nucleotide
  modified_base 19: mod_base = OTHER; note = 2'-O-methyl modified nucleotide
  modified_base 20: mod_base = OTHER; note = 2'-O-methyl modified nucleotide with thiophosphate linkage
  modified_base 21: mod_base = OTHER; note = 2'-O-methyl modified nucleotide
cgggtccaggattgctaccaa

SEQ ID NO: 311 - RNA, 21 nt, synthetic construct
  source 1..21: mol_type = other RNA
  modified_base 1: mod_base = OTHER; note = 2'-O-methyl modified nucleotide with thiophosphate linkage
  modified_base 2: mod_base = OTHER; note = 2'-O-methyl modified nucleotide with thiophosphate linkage
  modified_base 3: mod_base = OTHER; note = 2'-O-methyl modified nucleotide
  modified_base 4: mod_base = OTHER; note = 2'-O-methyl modified nucleotide
  modified_base 5: mod_base = OTHER; note = 2'-O-methyl modified nucleotide
  modified_base 6: mod_base = OTHER; note = 2'-O-methyl modified nucleotide
  modified_base 7: mod_base = OTHER; note = 2'-O-methyl modified nucleotide
  modified_base 8: mod_base = OTHER; note = 2'-O-methyl modified nucleotide
  modified_base 9: mod_base = OTHER; note = 2'-fluoro modified nucleotide
  modified_base 10: mod_base = OTHER; note = 2'-O-methyl modified nucleotide
  modified_base 11: mod_base = OTHER; note = 2'-fluoro modified nucleotide
  modified_base 12: mod_base = OTHER; note = 2'-O-methyl modified nucleotide
  modified_base 13: mod_base = OTHER; note = 2'-fluoro modified nucleotide
  modified_base 14: mod_base = OTHER; note = 2'-O-methyl modified nucleotide
  modified_base 15: mod_base = OTHER; note = 2'-O-methyl modified nucleotide
  modified_base 16: mod_base = OTHER; note = 2'-O-methyl modified nucleotide
  modified_base 17: mod_base = OTHER; note = 2'-O-methyl modified nucleotide
  modified_base 18: mod_base = OTHER; note = 2'-O-methyl modified nucleotide
  modified_base 19: mod_base = OTHER; note = 2'-O-methyl modified nucleotide
  modified_base 20: mod_base = OTHER; note = 2'-O-methyl modified nucleotide with thiophosphate linkage
  modified_base 21: mod_base = OTHER; note = 2'-O-methyl modified nucleotide
gtgtcacaggaaggacatgta

SEQ ID NO: 312 - RNA, 21 nt, synthetic construct
  source 1..21: mol_type = other RNA
  modified_base 1: mod_base = OTHER; note = 2'-O-methyl modified nucleotide with thiophosphate linkage
  modified_base 2: mod_base = OTHER; note = 2'-O-methyl modified nucleotide with thiophosphate linkage
  modified_base 3: mod_base = OTHER; note = 2'-O-methyl modified nucleotide
  modified_base 4: mod_base = OTHER; note = 2'-O-methyl modified nucleotide
  modified_base 5: mod_base = OTHER; note = 2'-O-methyl modified nucleotide
  modified_base 6: mod_base = OTHER; note = 2'-O-methyl modified nucleotide
  modified_base 7: mod_base = OTHER; note = 2'-O-methyl modified nucleotide
  modified_base 8: mod_base = OTHER; note = 2'-O-methyl modified nucleotide
  modified_base 9: mod_base = OTHER; note = 2'-fluoro modified nucleotide
  modified_base 10: mod_base = OTHER; note = 2'-O-methyl modified nucleotide
  modified_base 11: mod_base = OTHER; note = 2'-fluoro modified nucleotide
  modified_base 12: mod_base = OTHER; note = 2'-O-methyl modified nucleotide
  modified_base 13: mod_base = OTHER; note = 2'-fluoro modified nucleotide
  modified_base 14: mod_base = OTHER; note = 2'-O-methyl modified nucleotide
  modified_base 15: mod_base = OTHER; note = 2'-O-methyl modified nucleotide
  modified_base 16: mod_base = OTHER; note = 2'-O-methyl modified nucleotide
  modified_base 17: mod_base = OTHER; note = 2'-O-methyl modified nucleotide
  modified_base 18: mod_base = OTHER; note = 2'-O-methyl modified nucleotide
  modified_base 19: mod_base = OTHER; note = 2'-O-methyl modified nucleotide
  modified_base 20: mod_base = OTHER; note = 2'-O-methyl modified nucleotide with thiophosphate linkage
  modified_base 21: mod_base = OTHER; note = 2'-O-methyl modified nucleotide
cgaaggacatgtcagtcttga

SEQ ID NO: 313 - RNA, 21 nt, synthetic construct
  source 1..21: mol_type = other RNA
  modified_base 1: mod_base = OTHER; note = 2'-O-methyl modified nucleotide with thiophosphate linkage
  modified_base 2: mod_base = OTHER; note = 2'-O-methyl modified nucleotide with thiophosphate linkage
  modified_base 3: mod_base = OTHER; note = 2'-O-methyl modified nucleotide
  modified_base 4: mod_base = OTHER; note = 2'-O-methyl modified nucleotide
  modified_base 5: mod_base = OTHER; note = 2'-O-methyl modified nucleotide
  modified_base 6: mod_base = OTHER; note = 2'-O-methyl modified nucleotide
  modified_base 7: mod_base = OTHER; note = 2'-O-methyl modified nucleotide
  modified_base 8: mod_base = OTHER; note = 2'-O-methyl modified nucleotide
  modified_base 9: mod_base = OTHER; note = 2'-fluoro modified nucleotide
  modified_base 10: mod_base = OTHER; note = 2'-O-methyl modified nucleotide
  modified_base 11: mod_base = OTHER; note = 2'-fluoro modified nucleotide
  modified_base 12: mod_base = OTHER; note = 2'-O-methyl modified nucleotide
  modified_base 13: mod_base = OTHER; note = 2'-fluoro modified nucleotide
  modified_base 14: mod_base = OTHER; note = 2'-O-methyl modified nucleotide
  modified_base 15: mod_base = OTHER; note = 2'-O-methyl modified nucleotide
  modified_base 16: mod_base = OTHER; note = 2'-O-methyl modified nucleotide
  modified_base 17: mod_base = OTHER; note = 2'-O-methyl modified nucleotide
  modified_base 18: mod_base = OTHER; note = 2'-O-methyl modified nucleotide
  modified_base 19: mod_base = OTHER; note = 2'-O-methyl modified nucleotide
  modified_base 20: mod_base = OTHER; note = 2'-O-methyl modified nucleotide with thiophosphate linkage
  modified_base 21: mod_base = OTHER; note = 2'-O-methyl modified nucleotide
caaggacatgtcagtcttgga

SEQ ID NO: 314 - RNA, 21 nt, synthetic construct
  source 1..21: mol_type = other RNA
  modified_base 1: mod_base = OTHER; note = 2'-O-methyl modified nucleotide with thiophosphate linkage
  modified_base 2: mod_base = OTHER; note = 2'-O-methyl modified nucleotide with thiophosphate linkage
  modified_base 3: mod_base = OTHER; note = 2'-O-methyl modified nucleotide
  modified_base 4: mod_base = OTHER; note = 2'-O-methyl modified nucleotide
  modified_base 5: mod_base = OTHER; note = 2'-O-methyl modified nucleotide
  modified_base 6: mod_base = OTHER; note = 2'-O-methyl modified nucleotide
  modified_base 7: mod_base = OTHER; note = 2'-O-methyl modified nucleotide
  modified_base 8: mod_base = OTHER; note = 2'-O-methyl modified nucleotide
  modified_base 9: mod_base = OTHER; note = 2'-fluoro modified nucleotide
  modified_base 10: mod_base = OTHER; note = 2'-O-methyl modified nucleotide
  modified_base 11: mod_base = OTHER; note = 2'-fluoro modified nucleotide
  modified_base 12: mod_base = OTHER; note = 2'-O-methyl modified nucleotide
  modified_base 13: mod_base = OTHER; note = 2'-fluoro modified nucleotide
  modified_base 14: mod_base = OTHER; note = 2'-O-methyl modified nucleotide
  modified_base 15: mod_base = OTHER; note = 2'-O-methyl modified nucleotide
  modified_base 16: mod_base = OTHER; note = 2'-O-methyl modified nucleotide
  modified_base 17: mod_base = OTHER; note = 2'-O-methyl modified nucleotide
  modified_base 18: mod_base = OTHER; note = 2'-O-methyl modified nucleotide
  modified_base 19: mod_base = OTHER; note = 2'-O-methyl modified nucleotide
  modified_base 20: mod_base = OTHER; note = 2'-O-methyl modified nucleotide with thiophosphate linkage
  modified_base 21: mod_base = OTHER; note = 2'-O-methyl modified nucleotide
ctcagtcttggtcctctatga

SEQ ID NO: 315 - RNA, 21 nt, synthetic construct
  source 1..21: mol_type = other RNA
  modified_base 1: mod_base = OTHER; note = 2'-O-methyl modified nucleotide with thiophosphate linkage
  modified_base 2: mod_base = OTHER; note = 2'-O-methyl modified nucleotide with thiophosphate linkage
  modified_base 3: mod_base = OTHER; note = 2'-O-methyl modified nucleotide
  modified_base 4: mod_base = OTHER; note = 2'-O-methyl modified nucleotide
  modified_base 5: mod_base = OTHER; note = 2'-O-methyl modified nucleotide
  modified_base 6: mod_base = OTHER; note = 2'-O-methyl modified nucleotide
  modified_base 7: mod_base = OTHER; note = 2'-O-methyl modified nucleotide
  modified_base 8: mod_base = OTHER; note = 2'-O-methyl modified nucleotide
  modified_base 9: mod_base = OTHER; note = 2'-fluoro modified nucleotide
  modified_base 10: mod_base = OTHER; note = 2'-O-methyl modified nucleotide
  modified_base 11: mod_base = OTHER; note = 2'-fluoro modified nucleotide
  modified_base 12: mod_base = OTHER; note = 2'-O-methyl modified nucleotide
  modified_base 13: mod_base = OTHER; note = 2'-fluoro modified nucleotide
  modified_base 14: mod_base = OTHER; note = 2'-O-methyl modified nucleotide
  modified_base 15: mod_base = OTHER; note = 2'-O-methyl modified nucleotide
  modified_base 16: mod_base = OTHER; note = 2'-O-methyl modified nucleotide
  modified_base 17: mod_base = OTHER; note = 2'-O-methyl modified nucleotide
  modified_base 18: mod_base = OTHER; note = 2'-O-methyl modified nucleotide
  modified_base 19: mod_base = OTHER; note = 2'-O-methyl modified nucleotide
  modified_base 20: mod_base = OTHER; note = 2'-O-methyl modified nucleotide with thiophosphate linkage
  modified_base 21: mod_base = OTHER; note = 2'-O-methyl modified nucleotide
ctccttggtgttataccatga

SEQ ID NO: 316 - RNA, 21 nt, synthetic construct
  source 1..21: mol_type = other RNA
  modified_base 1: mod_base = OTHER; note = 2'-O-methyl modified nucleotide with thiophosphate linkage
  modified_base 2: mod_base = OTHER; note = 2'-O-methyl modified nucleotide with thiophosphate linkage
  modified_base 3: mod_base = OTHER; note = 2'-O-methyl modified nucleotide
  modified_base 4: mod_base = OTHER; note = 2'-O-methyl modified nucleotide
  modified_base 5: mod_base = OTHER; note = 2'-O-methyl modified nucleotide
  modified_base 6: mod_base = OTHER; note = 2'-O-methyl modified nucleotide
  modified_base 7: mod_base = OTHER; note = 2'-O-methyl modified nucleotide
  modified_base 8: mod_base = OTHER; note = 2'-O-methyl modified nucleotide
  modified_base 9: mod_base = OTHER; note = 2'-fluoro modified nucleotide
  modified_base 10: mod_base = OTHER; note = 2'-O-methyl modified nucleotide
  modified_base 11: mod_base = OTHER; note = 2'-fluoro modified nucleotide
  modified_base 12: mod_base = OTHER; note = 2'-O-methyl modified nucleotide
  modified_base 13: mod_base = OTHER; note = 2'-fluoro modified nucleotide
  modified_base 14: mod_base = OTHER; note = 2'-O-methyl modified nucleotide
  modified_base 15: mod_base = OTHER; note = 2'-O-methyl modified nucleotide
  modified_base 16: mod_base = OTHER; note = 2'-O-methyl modified nucleotide
  modified_base 17: mod_base = OTHER; note = 2'-O-methyl modified nucleotide
  modified_base 18: mod_base = OTHER; note = 2'-O-methyl modified nucleotide
  modified_base 19: mod_base = OTHER; note = 2'-O-methyl modified nucleotide
  modified_base 20: mod_base = OTHER; note = 2'-O-methyl modified nucleotide with thiophosphate linkage
  modified_base 21: mod_base = OTHER; note = 2'-O-methyl modified nucleotide
gtggtgttataccatggatca

SEQ ID NO: 317 - RNA, 21 nt, synthetic construct
  source 1..21: mol_type = other RNA
  modified_base 1: mod_base = OTHER; note = 2'-O-methyl modified nucleotide with thiophosphate linkage
  modified_base 2: mod_base = OTHER; note = 2'-O-methyl modified nucleotide with thiophosphate linkage
  modified_base 3: mod_base = OTHER; note = 2'-O-methyl modified nucleotide
  modified_base 4: mod_base = OTHER; note = 2'-O-methyl modified nucleotide
  modified_base 5: mod_base = OTHER; note = 2'-O-methyl modified nucleotide
  modified_base 6: mod_base = OTHER; note = 2'-O-methyl modified nucleotide
  modified_base 7: mod_base = OTHER; note = 2'-O-methyl modified nucleotide
  modified_base 8: mod_base = OTHER; note = 2'-O-methyl modified nucleotide
  modified_base 9: mod_base = OTHER; note = 2'-fluoro modified nucleotide
  modified_base 10: mod_base = OTHER; note = 2'-O-methyl modified nucleotide
  modified_base 11: mod_base = OTHER; note = 2'-fluoro modified nucleotide
  modified_base 12: mod_base = OTHER; note = 2'-O-methyl modified nucleotide
  modified_base 13: mod_base = OTHER; note = 2'-fluoro modified nucleotide
  modified_base 14: mod_base = OTHER; note = 2'-O-methyl modified nucleotide
  modified_base 15: mod_base = OTHER; note = 2'-O-methyl modified nucleotide
  modified_base 16: mod_base = OTHER; note = 2'-O-methyl modified nucleotide
  modified_base 17: mod_base = OTHER; note = 2'-O-methyl modified nucleotide
  modified_base 18: mod_base = OTHER; note = 2'-O-methyl modified nucleotide
  modified_base 19: mod_base = OTHER; note = 2'-O-methyl modified nucleotide
  modified_base 20: mod_base = OTHER; note = 2'-O-methyl modified nucleotide with thiophosphate linkage
  modified_base 21: mod_base = OTHER; note = 2'-O-methyl modified nucleotide
gggtgttataccatggatcca

SEQ ID NO: 318 - RNA, 21 nt, synthetic construct
  source 1..21: mol_type = other RNA
  modified_base 1: mod_base = OTHER; note = 2'-O-methyl modified nucleotide with thiophosphate linkage
  modified_base 2: mod_base = OTHER; note = 2'-O-methyl modified nucleotide with thiophosphate linkage
  modified_base 3: mod_base = OTHER; note = 2'-O-methyl modified nucleotide
  modified_base 4: mod_base = OTHER; note = 2'-O-methyl modified nucleotide
  modified_base 5: mod_base = OTHER; note = 2'-O-methyl modified nucleotide
  modified_base 6: mod_base = OTHER; note = 2'-O-methyl modified nucleotide
  modified_base 7: mod_base = OTHER; note = 2'-O-methyl modified nucleotide
  modified_base 8: mod_base = OTHER; note = 2'-O-methyl modified nucleotide
  modified_base 9: mod_base = OTHER; note = 2'-fluoro modified nucleotide
  modified_base 10: mod_base = OTHER; note = 2'-O-methyl modified nucleotide
  modified_base 11: mod_base = OTHER; note = 2'-fluoro modified nucleotide
  modified_base 12: mod_base = OTHER; note = 2'-O-methyl modified nucleotide
  modified_base 13: mod_base = OTHER; note = 2'-fluoro modified nucleotide
  modified_base 14: mod_base = OTHER; note = 2'-O-methyl modified nucleotide
  modified_base 15: mod_base = OTHER; note = 2'-O-methyl modified nucleotide
  modified_base 16: mod_base = OTHER; note = 2'-O-methyl modified nucleotide
  modified_base 17: mod_base = OTHER; note = 2'-O-methyl modified nucleotide
  modified_base 18: mod_base = OTHER; note = 2'-O-methyl modified nucleotide
  modified_base 19: mod_base = OTHER; note = 2'-O-methyl modified nucleotide
  modified_base 20: mod_base = OTHER; note = 2'-O-methyl modified nucleotide with thiophosphate linkage
  modified_base 21: mod_base = OTHER; note = 2'-O-methyl modified nucleotide
cttataccatggatcccaata

SEQ ID NO: 319 - RNA, 21 nt, synthetic construct
  source 1..21: mol_type = other RNA
  modified_base 1: mod_base = OTHER; note = 2'-O-methyl modified nucleotide with thiophosphate linkage
  modified_base 2: mod_base = OTHER; note = 2'-O-methyl modified nucleotide with thiophosphate linkage
  modified_base 3: mod_base = OTHER; note = 2'-O-methyl modified nucleotide
  modified_base 4: mod_base = OTHER; note = 2'-O-methyl modified nucleotide
  modified_base 5: mod_base = OTHER; note = 2'-O-methyl modified nucleotide
  modified_base 6: mod_base = OTHER; note = 2'-O-methyl modified nucleotide
  modified_base 7: mod_base = OTHER; note = 2'-O-methyl modified nucleotide
  modified_base 8: mod_base = OTHER; note = 2'-O-methyl modified nucleotide
  modified_base 9: mod_base = OTHER; note = 2'-fluoro modified nucleotide
  modified_base 10: mod_base = OTHER; note = 2'-O-methyl modified nucleotide
  modified_base 11: mod_base = OTHER; note = 2'-fluoro modified nucleotide
  modified_base 12: mod_base = OTHER; note = 2'-O-methyl modified nucleotide
  modified_base 13: mod_base = OTHER; note = 2'-fluoro modified nucleotide
  modified_base 14: mod_base = OTHER; note = 2'-O-methyl modified nucleotide
  modified_base 15: mod_base = OTHER; note = 2'-O-methyl modified nucleotide
  modified_base 16: mod_base = OTHER; note = 2'-O-methyl modified nucleotide
  modified_base 17: mod_base = OTHER; note = 2'-O-methyl modified nucleotide
  modified_base 18: mod_base = OTHER; note = 2'-O-methyl modified nucleotide
  modified_base 19: mod_base = OTHER; note = 2'-O-methyl modified nucleotide
  modified_base 20: mod_base = OTHER; note = 2'-O-methyl modified nucleotide with thiophosphate linkage
  modified_base 21: mod_base = OTHER; note = 2'-O-methyl modified nucleotide
gataccatggatcccaatgta

SEQ ID NO: 320 - RNA, 21 nt, synthetic construct
  source 1..21: mol_type = other RNA
  modified_base 1: mod_base = OTHER; note = 2'-O-methyl modified nucleotide with thiophosphate linkage
  modified_base 2: mod_base = OTHER; note = 2'-O-methyl modified nucleotide with thiophosphate linkage
  modified_base 3: mod_base = OTHER; note = 2'-O-methyl modified nucleotide
  modified_base 4: mod_base = OTHER; note = 2'-O-methyl modified nucleotide
  modified_base 5: mod_base = OTHER; note = 2'-O-methyl modified nucleotide
  modified_base 6: mod_base = OTHER; note = 2'-O-methyl modified nucleotide
  modified_base 7: mod_base = OTHER; note = 2'-O-methyl modified nucleotide
  modified_base 8: mod_base = OTHER; note = 2'-O-methyl modified nucleotide
  modified_base 9: mod_base = OTHER; note = 2'-fluoro modified nucleotide
  modified_base 10: mod_base = OTHER; note = 2'-O-methyl modified nucleotide
  modified_base 11: mod_base = OTHER; note = 2'-fluoro modified nucleotide
  modified_base 12: mod_base = OTHER; note = 2'-O-methyl modified nucleotide
  modified_base 13: mod_base = OTHER; note = 2'-fluoro modified nucleotide
  modified_base 14: mod_base = OTHER; note = 2'-O-methyl modified nucleotide
  modified_base 15: mod_base = OTHER; note = 2'-O-methyl modified nucleotide
  modified_base 16: mod_base = OTHER; note = 2'-O-methyl modified nucleotide
  modified_base 17: mod_base = OTHER; note = 2'-O-methyl modified nucleotide
  modified_base 18: mod_base = OTHER; note = 2'-O-methyl modified nucleotide
  modified_base 19: mod_base = OTHER; note = 2'-O-methyl modified nucleotide
  modified_base 20: mod_base = OTHER; note = 2'-O-methyl modified nucleotide with thiophosphate linkage
  modified_base 21: mod_base = OTHER; note = 2'-O-methyl modified nucleotide
gcctgacacaatgtccagtga

SEQ ID NO: 321 - RNA, 21 nt, synthetic construct
  source 1..21: mol_type = other RNA
  modified_base 1: mod_base = OTHER; note = 2'-O-methyl modified nucleotide with thiophosphate linkage
  modified_base 2: mod_base = OTHER; note = 2'-O-methyl modified nucleotide with thiophosphate linkage
  modified_base 3: mod_base = OTHER; note = 2'-O-methyl modified nucleotide
  modified_base 4: mod_base = OTHER; note = 2'-O-methyl modified nucleotide
  modified_base 5: mod_base = OTHER; note = 2'-O-methyl modified nucleotide
  modified_base 6: mod_base = OTHER; note = 2'-O-methyl modified nucleotide
  modified_base 7: mod_base = OTHER; note = 2'-O-methyl modified nucleotide
  modified_base 8: mod_base = OTHER; note = 2'-O-methyl modified nucleotide
  modified_base 9: mod_base = OTHER; note = 2'-fluoro modified nucleotide
  modified_base 10: mod_base = OTHER; note = 2'-O-methyl modified nucleotide
  modified_base 11: mod_base = OTHER; note = 2'-fluoro modified nucleotide
  modified_base 12: mod_base = OTHER; note = 2'-O-methyl modified nucleotide
  modified_base 13: mod_base = OTHER; note = 2'-fluoro modified nucleotide
  modified_base 14: mod_base = OTHER; note = 2'-O-methyl modified nucleotide
  modified_base 15: mod_base = OTHER; note = 2'-O-methyl modified nucleotide
  modified_base 16: mod_base = OTHER; note = 2'-O-methyl modified nucleotide
  modified_base 17: mod_base = OTHER; note = 2'-O-methyl modified nucleotide
  modified_base 18: mod_base = OTHER; note = 2'-O-methyl modified nucleotide
  modified_base 19: mod_base = OTHER; note = 2'-O-methyl modified nucleotide
  modified_base 20: mod_base = OTHER; note = 2'-O-methyl modified nucleotide with thiophosphate linkage
  modified_base 21: mod_base = OTHER; note = 2'-O-methyl modified nucleotide
ggacacaatgtccagtgacaa

SEQ ID NO: 322 - RNA, 21 nt, synthetic construct
  source 1..21: mol_type = other RNA
  modified_base 1: mod_base = OTHER; note = 2'-O-methyl modified nucleotide with thiophosphate linkage
  modified_base 2: mod_base = OTHER; note = 2'-O-methyl modified nucleotide with thiophosphate linkage
  modified_base 3: mod_base = OTHER; note = 2'-O-methyl modified nucleotide
  modified_base 4: mod_base = OTHER; note = 2'-O-methyl modified nucleotide
  modified_base 5: mod_base = OTHER; note = 2'-O-methyl modified nucleotide
  modified_base 6: mod_base = OTHER; note = 2'-O-methyl modified nucleotide
  modified_base 7: mod_base = OTHER; note = 2'-O-methyl modified nucleotide
  modified_base 8: mod_base = OTHER; note = 2'-O-methyl modified nucleotide
  modified_base 9: mod_base = OTHER; note = 2'-fluoro modified nucleotide
  modified_base 10: mod_base = OTHER; note = 2'-O-methyl modified nucleotide
  modified_base 11: mod_base = OTHER; note = 2'-fluoro modified nucleotide
  modified_base 12: mod_base = OTHER; note = 2'-O-methyl modified nucleotide
  modified_base 13: mod_base = OTHER; note = 2'-fluoro modified nucleotide
  modified_base 14: mod_base = OTHER; note = 2'-O-methyl modified nucleotide
  modified_base 15: mod_base = OTHER; note = 2'-O-methyl modified nucleotide
  modified_base 16: mod_base = OTHER; note = 2'-O-methyl modified nucleotide
  modified_base 17: mod_base = OTHER; note = 2'-O-methyl modified nucleotide
  modified_base 18: mod_base = OTHER; note = 2'-O-methyl modified nucleotide
  modified_base 19: mod_base = OTHER; note = 2'-O-methyl modified nucleotide
  modified_base 20: mod_base = OTHER; note = 2'-O-methyl modified nucleotide with thiophosphate linkage
  modified_base 21: mod_base = OTHER; note = 2'-O-methyl modified nucleotide
gaatgtccagtgacagaatca

SEQ ID NO: 323 - RNA, 21 nt, synthetic construct
  source 1..21: mol_type = other RNA
  modified_base 1: mod_base = OTHER; note = 2'-O-methyl modified nucleotide with thiophosphate linkage
  modified_base 2: mod_base = OTHER; note = 2'-O-methyl modified nucleotide with thiophosphate linkage
  modified_base 3: mod_base = OTHER; note = 2'-O-methyl modified nucleotide
  modified_base 4: mod_base = OTHER; note = 2'-O-methyl modified nucleotide
  modified_base 5: mod_base = OTHER; note = 2'-O-methyl modified nucleotide
  modified_base 6: mod_base = OTHER; note = 2'-O-methyl modified nucleotide
  modified_base 7: mod_base = OTHER; note = 2'-O-methyl modified nucleotide
  modified_base 8: mod_base = OTHER; note = 2'-O-methyl modified nucleotide
  modified_base 9: mod_base = OTHER; note = 2'-fluoro modified nucleotide
  modified_base 10: mod_base = OTHER; note = 2'-O-methyl modified nucleotide
  modified_base 11: mod_base = OTHER; note = 2'-fluoro modified nucleotide
  modified_base 12: mod_base = OTHER; note = 2'-O-methyl modified nucleotide
  modified_base 13: mod_base = OTHER; note = 2'-fluoro modified nucleotide
  modified_base 14: mod_base = OTHER; note = 2'-O-methyl modified nucleotide
  modified_base 15: mod_base = OTHER; note = 2'-O-methyl modified nucleotide
  modified_base 16: mod_base = OTHER; note = 2'-O-methyl modified nucleotide
  modified_base 17: mod_base = OTHER; note = 2'-O-methyl modified nucleotide
  modified_base 18: mod_base = OTHER; note = 2'-O-methyl modified nucleotide
  modified_base 19: mod_base = OTHER; note = 2'-O-methyl modified nucleotide
  modified_base 20: mod_base = OTHER; note = 2'-O-methyl modified nucleotide with thiophosphate linkage
  modified_base 21: mod_base = OTHER; note = 2'-O-methyl modified nucleotide
gatgtccagtgacagaatcaa

SEQ ID NO: 324 - RNA, 21 nt, synthetic construct
  source 1..21: mol_type = other RNA
  modified_base 1: mod_base = OTHER; note = 2'-O-methyl modified nucleotide with thiophosphate linkage
  modified_base 2: mod_base = OTHER; note = 2'-O-methyl modified nucleotide with thiophosphate linkage
  modified_base 3: mod_base = OTHER; note = 2'-O-methyl modified nucleotide
  modified_base 4: mod_base = OTHER; note = 2'-O-methyl modified nucleotide
  modified_base 5: mod_base = OTHER; note = 2'-O-methyl modified nucleotide
  modified_base 6: mod_base = OTHER; note = 2'-O-methyl modified nucleotide
  modified_base 7: mod_base = OTHER; note = 2'-O-methyl modified nucleotide
  modified_base 8: mod_base = OTHER; note = 2'-O-methyl modified nucleotide
  modified_base 9: mod_base = OTHER; note = 2'-fluoro modified nucleotide
  modified_base 10: mod_base = OTHER; note = 2'-O-methyl modified nucleotide
  modified_base 11: mod_base = OTHER; note = 2'-fluoro modified nucleotide
  modified_base 12: mod_base = OTHER; note = 2'-O-methyl modified nucleotide
  modified_base 13: mod_base = OTHER; note = 2'-fluoro modified nucleotide
  modified_base 14: mod_base = OTHER; note = 2'-O-methyl modified nucleotide
  modified_base 15: mod_base = OTHER; note = 2'-O-methyl modified nucleotide
  modified_base 16: mod_base = OTHER; note = 2'-O-methyl modified nucleotide
  modified_base 17: mod_base = OTHER; note = 2'-O-methyl modified nucleotide
  modified_base 18: mod_base = OTHER; note = 2'-O-methyl modified nucleotide
  modified_base 19: mod_base = OTHER; note = 2'-O-methyl modified nucleotide
  modified_base 20: mod_base = OTHER; note = 2'-O-methyl modified nucleotide with thiophosphate linkage
  modified_base 21: mod_base = OTHER; note = 2'-O-methyl modified nucleotide
gtgtccagtgacagaatcaaa

SEQ ID NO: 325 - RNA, 21 nt, synthetic construct
  source 1..21: mol_type = other RNA
  modified_base 1: mod_base = OTHER; note = 2'-O-methyl modified nucleotide with thiophosphate linkage
  modified_base 2: mod_base = OTHER; note = 2'-O-methyl modified nucleotide with thiophosphate linkage
  modified_base 3: mod_base = OTHER; note = 2'-O-methyl modified nucleotide
  modified_base 4: mod_base = OTHER; note = 2'-O-methyl modified nucleotide
  modified_base 5: mod_base = OTHER; note = 2'-O-methyl modified nucleotide
  modified_base 6: mod_base = OTHER; note = 2'-O-methyl modified nucleotide
  modified_base 7: mod_base = OTHER; note = 2'-O-methyl modified nucleotide
  modified_base 8: mod_base = OTHER; note = 2'-O-methyl modified nucleotide
  modified_base 9: mod_base = OTHER; note = 2'-fluoro modified nucleotide
  modified_base 10: mod_base = OTHER; note = 2'-O-methyl modified nucleotide
  modified_base 11: mod_base = OTHER; note = 2'-fluoro modified nucleotide
  modified_base 12: mod_base = OTHER; note = 2'-O-methyl modified nucleotide
  modified_base 13: mod_base = OTHER; note = 2'-fluoro modified nucleotide
  modified_base 14: mod_base = OTHER; note = 2'-O-methyl modified nucleotide
  modified_base 15: mod_base = OTHER; note = 2'-O-methyl modified nucleotide
  modified_base 16: mod_base = OTHER; note = 2'-O-methyl modified nucleotide
  modified_base 17: mod_base = OTHER; note = 2'-O-methyl modified nucleotide
  modified_base 18: mod_base = OTHER; note = 2'-O-methyl modified nucleotide
  modified_base 19: mod_base = OTHER; note = 2'-O-methyl modified nucleotide
  modified_base 20: mod_base = OTHER; note = 2'-O-methyl modified nucleotide with thiophosphate linkage
  modified_base 21: mod_base = OTHER; note = 2'-O-methyl modified nucleotide
ggtccagtgacagaatcaaga

SEQ ID NO: 326 - RNA, 21 nt, synthetic construct
  source 1..21: mol_type = other RNA
  modified_base 1: mod_base = OTHER; note = 2'-O-methyl modified nucleotide with thiophosphate linkage
  modified_base 2: mod_base = OTHER; note = 2'-O-methyl modified nucleotide with thiophosphate linkage
  modified_base 3: mod_base = OTHER; note = 2'-O-methyl modified nucleotide
  modified_base 4: mod_base = OTHER; note = 2'-O-methyl modified nucleotide
  modified_base 5: mod_base = OTHER; note = 2'-O-methyl modified nucleotide
  modified_base 6: mod_base = OTHER; note = 2'-O-methyl modified nucleotide
  modified_base 7: mod_base = OTHER; note = 2'-O-methyl modified nucleotide
  modified_base 8: mod_base = OTHER; note = 2'-O-methyl modified nucleotide
  modified_base 9: mod_base = OTHER; note = 2'-fluoro modified nucleotide
  modified_base 10: mod_base = OTHER; note = 2'-O-methyl modified nucleotide
  modified_base 11: mod_base = OTHER; note = 2'-fluoro modified nucleotide
  modified_base 12: mod_base = OTHER; note = 2'-O-methyl modified nucleotide
  modified_base 13: mod_base = OTHER; note = 2'-fluoro modified nucleotide
  modified_base 14: mod_base = OTHER; note = 2'-O-methyl modified nucleotide
  modified_base 15: mod_base = OTHER; note = 2'-O-methyl modified nucleotide
  modified_base 16: mod_base = OTHER; note = 2'-O-methyl modified nucleotide
  modified_base 17: mod_base = OTHER; note = 2'-O-methyl modified nucleotide
  modified_base 18: mod_base = OTHER; note = 2'-O-methyl modified nucleotide
  modified_base 19: mod_base = OTHER; note = 2'-O-methyl modified nucleotide
  modified_base 20: mod_base = OTHER; note = 2'-O-methyl modified nucleotide with thiophosphate linkage
  modified_base 21: mod_base = OTHER; note = 2'-O-methyl modified nucleotide
gcagtgacagaatcaagtgta

SEQ ID NO: 327 - RNA, 21 nt, synthetic construct
  source 1..21: mol_type = other RNA
  modified_base 1: mod_base = OTHER; note = 2'-O-methyl modified nucleotide with thiophosphate linkage
  modified_base 2: mod_base = OTHER; note = 2'-O-methyl modified nucleotide with thiophosphate linkage
  modified_base 3: mod_base = OTHER; note = 2'-O-methyl modified nucleotide
  modified_base 4: mod_base = OTHER; note = 2'-O-methyl modified nucleotide
  modified_base 5: mod_base = OTHER; note = 2'-O-methyl modified nucleotide
  modified_base 6: mod_base = OTHER; note = 2'-O-methyl modified nucleotide
  modified_base 7: mod_base = OTHER; note = 2'-O-methyl modified nucleotide
  modified_base 8: mod_base = OTHER; note = 2'-O-methyl modified nucleotide
  modified_base 9: mod_base = OTHER; note = 2'-fluoro modified nucleotide
  modified_base 10: mod_base = OTHER; note = 2'-O-methyl modified nucleotide
  modified_base 11: mod_base = OTHER; note = 2'-fluoro modified nucleotide
  modified_base 12: mod_base = OTHER; note = 2'-O-methyl modified nucleotide
  modified_base 13: mod_base = OTHER; note = 2'-fluoro modified nucleotide
  modified_base 14: mod_base = OTHER; note = 2'-O-methyl modified nucleotide
  modified_base 15: mod_base = OTHER; note = 2'-O-methyl modified nucleotide
  modified_base 16: mod_base = OTHER; note = 2'-O-methyl modified nucleotide
  modified_base 17: mod_base = OTHER; note = 2'-O-methyl modified nucleotide
  modified_base 18: mod_base = OTHER; note = 2'-O-methyl modified nucleotide
  modified_base 19: mod_base = OTHER; note = 2'-O-methyl modified nucleotide
  modified_base 20: mod_base = OTHER; note = 2'-O-methyl modified nucleotide with thiophosphate linkage
  modified_base 21: mod_base = OTHER; note = 2'-O-methyl modified nucleotide
gattctccaccactgttacaa

SEQ ID NO: 328 - RNA, 21 nt, synthetic construct
  source 1..21: mol_type = other RNA
  modified_base 1: mod_base = OTHER; note = 2'-O-methyl modified nucleotide with thiophosphate linkage
  modified_base 2: mod_base = OTHER; note = 2'-O-methyl modified nucleotide with thiophosphate linkage
  modified_base 3: mod_base = OTHER; note = 2'-O-methyl modified nucleotide
  modified_base 4: mod_base = OTHER; note = 2'-O-methyl modified nucleotide
  modified_base 5: mod_base = OTHER; note = 2'-O-methyl modified nucleotide
  modified_base 6: mod_base = OTHER; note = 2'-O-methyl modified nucleotide
  modified_base 7: mod_base = OTHER; note = 2'-O-methyl modified nucleotide
  modified_base 8: mod_base = OTHER; note = 2'-O-methyl modified nucleotide
  modified_base 9: mod_base = OTHER; note = 2'-fluoro modified nucleotide
  modified_base 10: mod_base = OTHER; note = 2'-O-methyl modified nucleotide
  modified_base 11: mod_base = OTHER; note = 2'-fluoro modified nucleotide
  modified_base 12: mod_base = OTHER; note = 2'-O-methyl modified nucleotide
  modified_base 13: mod_base = OTHER; note = 2'-fluoro modified nucleotide
  modified_base 14: mod_base = OTHER; note = 2'-O-methyl modified nucleotide
  modified_base 15: mod_base = OTHER; note = 2'-O-methyl modified nucleotide
  modified_base 16: mod_base = OTHER; note = 2'-O-methyl modified nucleotide
  modified_base 17: mod_base = OTHER; note = 2'-O-methyl modified nucleotide
  modified_base 18: mod_base = OTHER; note = 2'-O-methyl modified nucleotide
  modified_base 19: mod_base = OTHER; note = 2'-O-methyl modified nucleotide
  modified_base 20: mod_base = OTHER; note = 2'-O-methyl modified nucleotide with thiophosphate linkage
  modified_base 21: mod_base = OTHER; note = 2'-O-methyl modified nucleotide
gccaccactgttacaggaaga

SEQ ID NO: 329 - RNA, 21 nt, synthetic construct
  source 1..21: mol_type = other RNA
  modified_base 1: mod_base = OTHER; note = 2'-O-methyl modified nucleotide with thiophosphate linkage
  modified_base 2: mod_base = OTHER; note = 2'-O-methyl modified nucleotide with thiophosphate linkage
  modified_base 3: mod_base = OTHER; note = 2'-O-methyl modified nucleotide
  modified_base 4: mod_base = OTHER; note = 2'-O-methyl modified nucleotide
  modified_base 5: mod_base = OTHER; note = 2'-O-methyl modified nucleotide
  modified_base 6: mod_base = OTHER; note = 2'-O-methyl modified nucleotide
  modified_base 7: mod_base = OTHER; note = 2'-O-methyl modified nucleotide
  modified_base 8: mod_base = OTHER; note = 2'-O-methyl modified nucleotide
  modified_base 9: mod_base = OTHER; note = 2'-fluoro modified nucleotide
  modified_base 10: mod_base = OTHER; note = 2'-O-methyl modified nucleotide
  modified_base 11: mod_base = OTHER; note = 2'-fluoro modified nucleotide
  modified_base 12: mod_base = OTHER; note = 2'-O-methyl modified nucleotide
  modified_base 13: mod_base = OTHER; note = 2'-fluoro modified nucleotide
  modified_base 14: mod_base = OTHER; note = 2'-O-methyl modified nucleotide
  modified_base 15: mod_base = OTHER; note = 2'-O-methyl modified nucleotide
  modified_base 16: mod_base = OTHER; note = 2'-O-methyl modified nucleotide
  modified_base 17: mod_base = OTHER; note = 2'-O-methyl modified nucleotide
  modified_base 18: mod_base = OTHER; note = 2'-O-methyl modified nucleotide
  modified_base 19: mod_base = OTHER; note = 2'-O-methyl modified nucleotide
  modified_base 20: mod_base = OTHER; note = 2'-O-methyl modified nucleotide with thiophosphate linkage
  modified_base 21: mod_base = OTHER; note = 2'-O-methyl modified nucleotide
gacagaatactacccaaatga

SEQ ID NO: 330 - RNA, 21 nt, synthetic construct
  source 1..21: mol_type = other RNA
  modified_base 1: mod_base = OTHER; note = 2'-O-methyl modified nucleotide with thiophosphate linkage
  modified_base 2: mod_base = OTHER; note = 2'-O-methyl modified nucleotide with thiophosphate linkage
  modified_base 3: mod_base = OTHER; note = 2'-O-methyl modified nucleotide
  modified_base 4: mod_base = OTHER; note = 2'-O-methyl modified nucleotide
  modified_base 5: mod_base = OTHER; note = 2'-O-methyl modified nucleotide
  modified_base 6: mod_base = OTHER; note = 2'-O-methyl modified nucleotide
  modified_base 7: mod_base = OTHER; note = 2'-O-methyl modified nucleotide
  modified_base 8: mod_base = OTHER; note = 2'-O-methyl modified nucleotide
  modified_base 9: mod_base = OTHER; note = 2'-fluoro modified nucleotide
  modified_base 10: mod_base = OTHER; note = 2'-O-methyl modified nucleotide
  modified_base 11: mod_base = OTHER; note = 2'-fluoro modified nucleotide
  modified_base 12: mod_base = OTHER; note = 2'-O-methyl modified nucleotide
  modified_base 13: mod_base = OTHER; note = 2'-fluoro modified nucleotide
  modified_base 14: mod_base = OTHER; note = 2'-O-methyl modified nucleotide
  modified_base 15: mod_base = OTHER; note = 2'-O-methyl modified nucleotide
  modified_base 16: mod_base = OTHER; note = 2'-O-methyl modified nucleotide
  modified_base 17: mod_base = OTHER; note = 2'-O-methyl modified nucleotide
  modified_base 18: mod_base = OTHER; note = 2'-O-methyl modified nucleotide
  modified_base 19: mod_base = OTHER; note = 2'-O-methyl modified nucleotide
  modified_base 20: mod_base = OTHER; note = 2'-O-methyl modified nucleotide with thiophosphate linkage
  modified_base 21: mod_base = OTHER; note = 2'-O-methyl modified nucleotide
gcagaatactacccaaatgga

SEQ ID NO: 331 - RNA, 21 nt, synthetic construct
  source 1..21: mol_type = other RNA
  modified_base 1: mod_base = OTHER; note = 2'-O-methyl modified nucleotide with thiophosphate linkage
  modified_base 2: mod_base = OTHER; note = 2'-O-methyl modified nucleotide with thiophosphate linkage
  modified_base 3: mod_base = OTHER; note = 2'-O-methyl modified nucleotide
  modified_base 4: mod_base = OTHER; note = 2'-O-methyl modified nucleotide
  modified_base 5: mod_base = OTHER; note = 2'-O-methyl modified nucleotide
  modified_base 6: mod_base = OTHER; note = 2'-O-methyl modified nucleotide
  modified_base 7: mod_base = OTHER; note = 2'-O-methyl modified nucleotide
  modified_base 8: mod_base = OTHER; note = 2'-O-methyl modified nucleotide
  modified_base 9: mod_base = OTHER; note = 2'-fluoro modified nucleotide
  modified_base 10: mod_base = OTHER; note = 2'-O-methyl modified nucleotide
  modified_base 11: mod_base = OTHER; note = 2'-fluoro modified nucleotide
  modified_base 12: mod_base = OTHER; note = 2'-O-methyl modified nucleotide
  modified_base 13: mod_base = OTHER; note = 2'-fluoro modified nucleotide
  modified_base 14: mod_base = OTHER; note = 2'-O-methyl modified nucleotide
  modified_base 15: mod_base = OTHER; note = 2'-O-methyl modified nucleotide
  modified_base 16: mod_base = OTHER; note = 2'-O-methyl modified nucleotide
  modified_base 17: mod_base = OTHER; note = 2'-O-methyl modified nucleotide
  modified_base 18: mod_base = OTHER; note = 2'-O-methyl modified nucleotide
  modified_base 19: mod_base = OTHER; note = 2'-O-methyl modified nucleotide
  modified_base 20: mod_base = OTHER; note = 2'-O-methyl modified nucleotide with thiophosphate linkage
  modified_base 21: mod_base = OTHER; note = 2'-O-methyl modified nucleotide
ggattcgcccttggtgttata

SEQ ID NO: 332 - RNA, 21 nt, synthetic construct
  source 1..21: mol_type = other RNA
  modified_base 1: mod_base = OTHER; note = 2'-O-methyl modified nucleotide with thiophosphate linkage
  modified_base 2: mod_base = OTHER; note = 2'-O-methyl modified nucleotide with thiophosphate linkage
  modified_base 3: mod_base = OTHER; note = 2'-O-methyl modified nucleotide
  modified_base 4: mod_base = OTHER; note = 2'-O-methyl modified nucleotide
  modified_base 5: mod_base = OTHER; note = 2'-O-methyl modified nucleotide
  modified_base 6: mod_base = OTHER; note = 2'-O-methyl modified nucleotide
  modified_base 7: mod_base = OTHER; note = 2'-O-methyl modified nucleotide
  modified_base 8: mod_base = OTHER; note = 2'-O-methyl modified nucleotide
  modified_base 9: mod_base = OTHER; note = 2'-fluoro modified nucleotide
  modified_base 10: mod_base = OTHER; note = 2'-O-methyl modified nucleotide
  modified_base 11: mod_base = OTHER; note = 2'-fluoro modified nucleotide
  modified_base 12: mod_base = OTHER; note = 2'-O-methyl modified nucleotide
  modified_base 13: mod_base = OTHER; note = 2'-fluoro modified nucleotide
  modified_base 14: mod_base = OTHER; note = 2'-O-methyl modified nucleotide
  modified_base 15: mod_base = OTHER; note = 2'-O-methyl modified nucleotide
  modified_base 16: mod_base = OTHER; note = 2'-O-methyl modified nucleotide
  modified_base 17: mod_base = OTHER; note = 2'-O-methyl modified nucleotide
  modified_base 18: mod_base = OTHER; note = 2'-O-methyl modified nucleotide
  modified_base 19: mod_base = OTHER; note = 2'-O-methyl modified nucleotide
  modified_base 20: mod_base = OTHER; note = 2'-O-methyl modified nucleotide with thiophosphate linkage
  modified_base 21: mod_base = OTHER; note = 2'-O-methyl modified nucleotide
cattcgcccttggtgttataa

SEQ ID NO: 333 - RNA, 21 nt, synthetic construct
  source 1..21: mol_type = other RNA
  modified_base 1: mod_base = OTHER; note = 2'-O-methyl modified nucleotide with thiophosphate linkage
  modified_base 2: mod_base = OTHER; note = 2'-O-methyl modified nucleotide with thiophosphate linkage
  modified_base 3: mod_base = OTHER; note = 2'-O-methyl modified nucleotide
  modified_base 4: mod_base = OTHER; note = 2'-O-methyl modified nucleotide
  modified_base 5: mod_base = OTHER; note = 2'-O-methyl modified nucleotide
  modified_base 6: mod_base = OTHER; note = 2'-O-methyl modified nucleotide
  modified_base 7: mod_base = OTHER; note = 2'-O-methyl modified nucleotide
  modified_base 8: mod_base = OTHER; note = 2'-O-methyl modified nucleotide
  modified_base 9: mod_base = OTHER; note = 2'-fluoro modified nucleotide
  modified_base 10: mod_base = OTHER; note = 2'-O-methyl modified nucleotide
  modified_base 11: mod_base = OTHER; note = 2'-fluoro modified nucleotide
  modified_base 12: mod_base = OTHER; note = 2'-O-methyl modified nucleotide
  modified_base 13: mod_base = OTHER; note = 2'-fluoro modified nucleotide
  modified_base 14: mod_base = OTHER; note = 2'-O-methyl modified nucleotide
  modified_base 15: mod_base = OTHER; note = 2'-O-methyl modified nucleotide
  modified_base 16: mod_base = OTHER; note = 2'-O-methyl modified nucleotide
  modified_base 17: mod_base = OTHER; note = 2'-O-methyl modified nucleotide
  modified_base 18: mod_base = OTHER; note = 2'-O-methyl modified nucleotide
  modified_base 19: mod_base = OTHER; note = 2'-O-methyl modified nucleotide
  modified_base 20: mod_base = OTHER; note = 2'-O-methyl modified nucleotide with thiophosphate linkage
  modified_base 21: mod_base = OTHER; note = 2'-O-methyl modified nucleotide
gtcgcccttggtgttatacca

SEQ ID NO: 334 - RNA, 21 nt, synthetic construct
  source 1..21: mol_type = other RNA
  modified_base 1: mod_base = OTHER; note = 2'-O-methyl modified nucleotide with thiophosphate linkage
  modified_base 2: mod_base = OTHER; note = 2'-O-methyl modified nucleotide with thiophosphate linkage
  modified_base 3: mod_base = OTHER; note = 2'-O-methyl modified nucleotide
  modified_base 4: mod_base = OTHER; note = 2'-O-methyl modified nucleotide
  modified_base 5: mod_base = OTHER; note = 2'-O-methyl modified nucleotide
  modified_base 6: mod_base = OTHER; note = 2'-O-methyl modified nucleotide
  modified_base 7: mod_base = OTHER; note = 2'-O-methyl modified nucleotide
  modified_base 8: mod_base = OTHER; note = 2'-O-methyl modified nucleotide
  modified_base 9: mod_base = OTHER; note = 2'-fluoro modified nucleotide
  modified_base 10: mod_base = OTHER; note = 2'-O-methyl modified nucleotide
  modified_base 11: mod_base = OTHER; note = 2'-fluoro modified nucleotide
  modified_base 12: mod_base = OTHER; note = 2'-O-methyl modified nucleotide
  modified_base 13: mod_base = OTHER; note = 2'-fluoro modified nucleotide
  modified_base 14: mod_base = OTHER; note = 2'-O-methyl modified nucleotide
  modified_base 15: mod_base = OTHER; note = 2'-O-methyl modified nucleotide
  modified_base 16: mod_base = OTHER; note = 2'-O-methyl modified nucleotide
  modified_base 17: mod_base = OTHER; note = 2'-O-methyl modified nucleotide
  modified_base 18: mod_base = OTHER; note = 2'-O-methyl modified nucleotide
  modified_base 19: mod_base = OTHER; note = 2'-O-methyl modified nucleotide
  modified_base 20: mod_base = OTHER; note = 2'-O-methyl modified nucleotide with thiophosphate linkage
  modified_base 21: mod_base = OTHER; note = 2'-O-methyl modified nucleotide
ccccttggtgttataccatga

SEQ ID NO: 335 - RNA, 21 nt, synthetic construct
  source 1..21: mol_type = other RNA
  modified_base 1: mod_base = OTHER; note = 2'-O-methyl modified nucleotide with thiophosphate linkage
  modified_base 2: mod_base = OTHER; note = 2'-O-methyl modified nucleotide with thiophosphate linkage
  modified_base 3: mod_base = OTHER; note = 2'-O-methyl modified nucleotide
  modified_base 4: mod_base = OTHER; note = 2'-O-methyl modified nucleotide
  modified_base 5: mod_base = OTHER; note = 2'-O-methyl modified nucleotide
  modified_base 6: mod_base = OTHER; note = 2'-O-methyl modified nucleotide
  modified_base 7: mod_base = OTHER; note = 2'-O-methyl modified nucleotide
  modified_base 8: mod_base = OTHER; note = 2'-O-methyl modified nucleotide
  modified_base 9: mod_base = OTHER; note = 2'-fluoro modified nucleotide
  modified_base 10: mod_base = OTHER; note = 2'-O-methyl modified nucleotide
  modified_base 11: mod_base = OTHER; note = 2'-fluoro modified nucleotide
  modified_base 12: mod_base = OTHER; note = 2'-O-methyl modified nucleotide
  modified_base 13: mod_base = OTHER; note = 2'-fluoro modified nucleotide
  modified_base 14: mod_base = OTHER; note = 2'-O-methyl modified nucleotide
  modified_base 15: mod_base = OTHER; note = 2'-O-methyl modified nucleotide
  modified_base 16: mod_base = OTHER; note = 2'-O-methyl modified nucleotide
  modified_base 17: mod_base = OTHER; note = 2'-O-methyl modified nucleotide
  modified_base 18: mod_base = OTHER; note = 2'-O-methyl modified nucleotide
  modified_base 19: mod_base = OTHER; note = 2'-O-methyl modified nucleotide
  modified_base 20: mod_base = OTHER; note = 2'-O-methyl modified nucleotide with thiophosphate linkage
  modified_base 21: mod_base = OTHER; note = 2'-O-methyl modified nucleotide
ggatgtccagtgacagaatca

SEQ ID NO: 336 - RNA, 21 nt, synthetic construct
  source 1..21: mol_type = other RNA
  modified_base 1: mod_base = OTHER; note = 2'-O-methyl modified nucleotide with thiophosphate linkage
  modified_base 2: mod_base = OTHER; note = 2'-O-methyl modified nucleotide with thiophosphate linkage
  modified_base 3: mod_base = OTHER; note = 2'-O-methyl modified nucleotide
  modified_base 4: mod_base = OTHER; note = 2'-O-methyl modified nucleotide
  modified_base 5: mod_base = OTHER; note = 2'-O-methyl modified nucleotide
  modified_base 6: mod_base = OTHER; note = 2'-O-methyl modified nucleotide
  modified_base 7: mod_base = OTHER; note = 2'-O-methyl modified nucleotide
  modified_base 8: mod_base = OTHER; note = 2'-O-methyl modified nucleotide
  modified_base 9: mod_base = OTHER; note = 2'-fluoro modified nucleotide
  modified_base 10: mod_base = OTHER; note = 2'-O-methyl modified nucleotide
  modified_base 11: mod_base = OTHER; note = 2'-fluoro modified nucleotide
  modified_base 12: mod_base = OTHER; note = 2'-O-methyl modified nucleotide
  modified_base 13: mod_base = OTHER; note = 2'-fluoro modified nucleotide
  modified_base 14: mod_base = OTHER; note = 2'-O-methyl modified nucleotide
  modified_base 15: mod_base = OTHER; note = 2'-O-methyl modified nucleotide
  modified_base 16: mod_base = OTHER; note = 2'-O-methyl modified nucleotide
  modified_base 17: mod_base = OTHER; note = 2'-O-methyl modified nucleotide
  modified_base 18: mod_base = OTHER; note = 2'-O-methyl modified nucleotide
  modified_base 19: mod_base = OTHER; note = 2'-O-methyl modified nucleotide
  modified_base 20: mod_base = OTHER; note = 2'-O-methyl modified nucleotide with thiophosphate linkage
  modified_base 21: mod_base = OTHER; note = 2'-O-methyl modified nucleotide
gcagaggctccttctgaacaa

SEQ ID NO: 337 - RNA, 21 nt, synthetic construct
  source 1..21: mol_type = other RNA
  modified_base 1: mod_base = OTHER; note = 2'-O-methyl modified nucleotide with thiophosphate linkage
  modified_base 2: mod_base = OTHER; note = 2'-O-methyl modified nucleotide with thiophosphate linkage
  modified_base 3: mod_base = OTHER; note = 2'-O-methyl modified nucleotide
  modified_base 4: mod_base = OTHER; note = 2'-O-methyl modified nucleotide
  modified_base 5: mod_base = OTHER; note = 2'-O-methyl modified nucleotide
  modified_base 6: mod_base = OTHER; note = 2'-O-methyl modified nucleotide
  modified_base 7: mod_base = OTHER; note = 2'-O-methyl modified nucleotide
  modified_base 8: mod_base = OTHER; note = 2'-O-methyl modified nucleotide
  modified_base 9: mod_base = OTHER; note = 2'-fluoro modified nucleotide
  modified_base 10: mod_base = OTHER; note = 2'-O-methyl modified nucleotide
  modified_base 11: mod_base = OTHER; note = 2'-fluoro modified nucleotide
  modified_base 12: mod_base = OTHER; note = 2'-O-methyl modified nucleotide
  modified_base 13: mod_base = OTHER; note = 2'-fluoro modified nucleotide
  modified_base 14: mod_base = OTHER; note = 2'-O-methyl modified nucleotide
  modified_base 15: mod_base = OTHER; note = 2'-O-methyl modified nucleotide
  modified_base 16: mod_base = OTHER; note = 2'-O-methyl modified nucleotide
  modified_base 17: mod_base = OTHER; note = 2'-O-methyl modified nucleotide
  modified_base 18: mod_base = OTHER; note = 2'-O-methyl modified nucleotide
  modified_base 19: mod_base = OTHER; note = 2'-O-methyl modified nucleotide
  modified_base 20: mod_base = OTHER; note = 2'-O-methyl modified nucleotide with thiophosphate linkage
  modified_base 21: mod_base = OTHER; note = 2'-O-methyl modified nucleotide
gatcttggtcatctatgataa

SEQ ID NO: 338 - RNA, 21 nt, synthetic construct
  source 1..21: mol_type = other RNA
  modified_base 1: mod_base = OTHER; note = 2'-O-methyl modified nucleotide with thiophosphate linkage
  modified_base 2: mod_base = OTHER; note = 2'-O-methyl modified nucleotide with thiophosphate linkage
  modified_base 3: mod_base = OTHER; note = 2'-O-methyl modified nucleotide
  modified_base 4: mod_base = OTHER; note = 2'-O-methyl modified nucleotide
  modified_base 5: mod_base = OTHER; note = 2'-O-methyl modified nucleotide
  modified_base 6: mod_base = OTHER; note = 2'-O-methyl modified nucleotide
  modified_base 7: mod_base = OTHER; note = 2'-O-methyl modified nucleotide
  modified_base 8: mod_base = OTHER; note = 2'-O-methyl modified nucleotide
  modified_base 9: mod_base = OTHER; note = 2'-fluoro modified nucleotide
  modified_base 10: mod_base = OTHER; note = 2'-O-methyl modified nucleotide
  modified_base 11: mod_base = OTHER; note = 2'-fluoro modified nucleotide
  modified_base 12: mod_base = OTHER; note = 2'-O-methyl modified nucleotide
  modified_base 13: mod_base = OTHER; note = 2'-fluoro modified nucleotide
  modified_base 14: mod_base = OTHER; note = 2'-O-methyl modified nucleotide
  modified_base 15: mod_base = OTHER; note = 2'-O-methyl modified nucleotide
  modified_base 16: mod_base = OTHER; note = 2'-O-methyl modified nucleotide
  modified_base 17: mod_base = OTHER; note = 2'-O-methyl modified nucleotide
  modified_base 18: mod_base = OTHER; note = 2'-O-methyl modified nucleotide
  modified_base 19: mod_base = OTHER; note = 2'-O-methyl modified nucleotide
  modified_base 20: mod_base = OTHER; note = 2'-O-methyl modified nucleotide with thiophosphate linkage
  modified_base 21: mod_base = OTHER; note = 2'-O-methyl modified nucleotide
ggacacaatgctcagaaacaa

SEQ ID NO: 339 - RNA, 21 nt, synthetic construct
  source 1..21: mol_type = other RNA
  modified_base 1: mod_base = OTHER; note = 2'-O-methyl modified nucleotide with thiophosphate linkage
  modified_base 2: mod_base = OTHER; note = 2'-O-methyl modified nucleotide with thiophosphate linkage
  modified_base 3: mod_base = OTHER; note = 2'-O-methyl modified nucleotide
  modified_base 4: mod_base = OTHER; note = 2'-O-methyl modified nucleotide
  modified_base 5: mod_base = OTHER; note = 2'-O-methyl modified nucleotide
  modified_base 6: mod_base = OTHER; note = 2'-O-methyl modified nucleotide
  modified_base 7: mod_base = OTHER; note = 2'-O-methyl modified nucleotide
  modified_base 8: mod_base = OTHER; note = 2'-O-methyl modified nucleotide
  modified_base 9: mod_base = OTHER; note = 2'-fluoro modified nucleotide
  modified_base 10: mod_base = OTHER; note = 2'-O-methyl modified nucleotide
  modified_base 11: mod_base = OTHER; note = 2'-fluoro modified nucleotide
  modified_base 12: mod_base = OTHER; note = 2'-O-methyl modified nucleotide
  modified_base 13: mod_base = OTHER; note = 2'-fluoro modified nucleotide
  modified_base 14: mod_base = OTHER; note = 2'-O-methyl modified nucleotide
  modified_base 15: mod_base = OTHER; note = 2'-O-methyl modified nucleotide
  modified_base 16: mod_base = OTHER; note = 2'-O-methyl modified nucleotide
  modified_base 17: mod_base = OTHER; note = 2'-O-methyl modified nucleotide
  modified_base 18: mod_base = OTHER; note = 2'-O-methyl modified nucleotide
  modified_base 19: mod_base = OTHER; note = 2'-O-methyl modified nucleotide
  modified_base 20: mod_base = OTHER; note = 2'-O-methyl modified nucleotide with thiophosphate linkage
  modified_base 21: mod_base = OTHER; note = 2'-O-methyl modified nucleotide
ccagtgctaccatggtaatga

SEQ ID NO: 340 - RNA, 21 nt, synthetic construct
  source 1..21: mol_type = other RNA
  modified_base 1: mod_base = OTHER; note = 2'-O-methyl modified nucleotide with thiophosphate linkage
  modified_base 2: mod_base = OTHER; note = 2'-fluoro modified nucleotide with thiophosphate linkage
  modified_base 3: mod_base = OTHER; note = 2'-O-methyl modified nucleotide
  modified_base 4: mod_base = OTHER; note = 2'-O-methyl modified nucleotide
  modified_base 5: mod_base = OTHER; note = 2'-O-methyl modified nucleotide
  modified_base 6: mod_base = OTHER; note = 2'-O-methyl modified nucleotide
  modified_base 7: mod_base = OTHER; note = 2'-fluoro modified nucleotide
  modified_base 8: mod_base = OTHER; note = 2'-O-methyl modified nucleotide
  modified_base 9: mod_base = OTHER; note = 2'-O-methyl modified nucleotide
  modified_base 10: mod_base = OTHER; note = 2'-O-methyl modified nucleotide
  modified_base 11: mod_base = OTHER; note = 2'-O-methyl modified nucleotide
  modified_base 12: mod_base = OTHER; note = 2'-fluoro modified nucleotide
  modified_base 13: mod_base = OTHER; note = 2'-O-methyl modified nucleotide
  modified_base 14: mod_base = OTHER; note = 2'-fluoro modified nucleotide
  modified_base 15: mod_base = OTHER; note = 2'-O-methyl modified nucleotide
  modified_base 16: mod_base = OTHER; note = 2'-fluoro modified nucleotide
  modified_base 17: mod_base = OTHER; note = 2'-O-methyl modified nucleotide
  modified_base 18: mod_base = OTHER; note = 2'-O-methyl modified nucleotide
  modified_base 19: mod_base = OTHER; note = 2'-O-methyl modified nucleotide with thiophosphate linkage
  modified_base 20: mod_base = OTHER; note = 2'-O-methyl modified nucleotide with thiophosphate linkage
  modified_base 21: mod_base = OTHER; note = 2'-O-methyl modified nucleotide
ttggtagcaatcctggaccag

SEQ ID NO: 341 - RNA, 21 nt, synthetic construct
  source 1..21: mol_type = other RNA
  modified_base 1: mod_base = OTHER; note = 2'-O-methyl modified nucleotide with thiophosphate linkage
  modified_base 2: mod_base = OTHER; note = 2'-fluoro modified nucleotide with thiophosphate linkage
  modified_base 3: mod_base = OTHER; note = 2'-O-methyl modified nucleotide
  modified_base 4: mod_base = OTHER; note = 2'-O-methyl modified nucleotide
  modified_base 5: mod_base = OTHER; note = 2'-O-methyl modified nucleotide
  modified_base 6: mod_base = OTHER; note = 2'-O-methyl modified nucleotide
  modified_base 7: mod_base = OTHER; note = 2'-fluoro modified nucleotide
  modified_base 8: mod_base = OTHER; note = 2'-O-methyl modified nucleotide
  modified_base 9: mod_base = OTHER; note = 2'-O-methyl modified nucleotide
  modified_base 10: mod_base = OTHER; note = 2'-O-methyl modified nucleotide
  modified_base 11: mod_base = OTHER; note = 2'-O-methyl modified nucleotide
  modified_base 12: mod_base = OTHER; note = 2'-fluoro modified nucleotide
  modified_base 13: mod_base = OTHER; note = 2'-O-methyl modified nucleotide
  modified_base 14: mod_base = OTHER; note = 2'-fluoro modified nucleotide
  modified_base 15: mod_base = OTHER; note = 2'-O-methyl modified nucleotide
  modified_base 16: mod_base = OTHER; note = 2'-fluoro modified nucleotide
  modified_base 17: mod_base = OTHER; note = 2'-O-methyl modified nucleotide
  modified_base 18: mod_base = OTHER; note = 2'-O-methyl modified nucleotide
  modified_base 19: mod_base = OTHER; note = 2'-O-methyl modified nucleotide with thiophosphate linkage
  modified_base 20: mod_base = OTHER; note = 2'-O-methyl modified nucleotide with thiophosphate linkage
  modified_base 21: mod_base = OTHER; note = 2'-O-methyl modified nucleotide
ttcgataactctgtccatcag

SEQ ID NO: 342 - RNA, 21 nt, synthetic construct
  source 1..21: mol_type = other RNA
  modified_base 1: mod_base = OTHER; note = 2'-O-methyl modified nucleotide with thiophosphate linkage
  modified_base 2: mod_base = OTHER; note = 2'-fluoro modified nucleotide with thiophosphate linkage
  modified_base 3: mod_base = OTHER; note = 2'-O-methyl modified nucleotide
  modified_base 4: mod_base = OTHER; note = 2'-O-methyl modified nucleotide
  modified_base 5: mod_base = OTHER; note = 2'-O-methyl modified nucleotide
  modified_base 6: mod_base = OTHER; note = 2'-O-methyl modified nucleotide
  modified_base 7: mod_base = OTHER; note = 2'-fluoro modified nucleotide
  modified_base 8: mod_base = OTHER; note = 2'-O-methyl modified nucleotide
  modified_base 9: mod_base = OTHER; note = 2'-O-methyl modified nucleotide
  modified_base 10: mod_base = OTHER; note = 2'-O-methyl modified nucleotide
  modified_base 11: mod_base = OTHER; note = 2'-O-methyl modified nucleotide
  modified_base 12: mod_base = OTHER; note = 2'-fluoro modified nucleotide
  modified_base 13: mod_base = OTHER; note = 2'-O-methyl modified nucleotide
  modified_base 14: mod_base = OTHER; note = 2'-fluoro modified nucleotide
  modified_base 15: mod_base = OTHER; note = 2'-O-methyl modified nucleotide
  modified_base 16: mod_base = OTHER; note = 2'-fluoro modified nucleotide
  modified_base 17: mod_base = OTHER; note = 2'-O-methyl modified nucleotide
  modified_base 18: mod_base = OTHER; note = 2'-O-methyl modified nucleotide
  modified_base 19: mod_base = OTHER; note = 2'-O-methyl modified nucleotide with thiophosphate linkage
  modified_base 20: mod_base = OTHER; note = 2'-O-methyl modified nucleotide with thiophosphate linkage
  modified_base 21: mod_base = OTHER; note = 2'-O-methyl modified nucleotide
tcctcgataactctgtccatg

SEQ ID NO: 343 - RNA, 21 nt, synthetic construct
  source 1..21: mol_type = other RNA
  modified_base 1: mod_base = OTHER; note = 2'-O-methyl modified nucleotide with thiophosphate linkage
  modified_base 2: mod_base = OTHER; note = 2'-fluoro modified nucleotide with thiophosphate linkage
  modified_base 3: mod_base = OTHER; note = 2'-O-methyl modified nucleotide
  modified_base 4: mod_base = OTHER; note = 2'-O-methyl modified nucleotide
  modified_base 5: mod_base = OTHER; note = 2'-O-methyl modified nucleotide
  modified_base 6: mod_base = OTHER; note = 2'-O-methyl modified nucleotide
  modified_base 7: mod_base = OTHER; note = 2'-fluoro modified nucleotide
  modified_base 8: mod_base = OTHER; note = 2'-O-methyl modified nucleotide
  modified_base 9: mod_base = OTHER; note = 2'-O-methyl modified nucleotide
  modified_base 10: mod_base = OTHER; note = 2'-O-methyl modified nucleotide
  modified_base 11: mod_base = OTHER; note = 2'-O-methyl modified nucleotide
  modified_base 12: mod_base = OTHER; note = 2'-fluoro modified nucleotide
  modified_base 13: mod_base = OTHER; note = 2'-O-methyl modified nucleotide
  modified_base 14: mod_base = OTHER; note = 2'-fluoro modified nucleotide
  modified_base 15: mod_base = OTHER; note = 2'-O-methyl modified nucleotide
  modified_base 16: mod_base = OTHER; note = 2'-fluoro modified nucleotide
  modified_base 17: mod_base = OTHER; note = 2'-O-methyl modified nucleotide
  modified_base 18: mod_base = OTHER; note = 2'-O-methyl modified nucleotide
  modified_base 19: mod_base = OTHER; note = 2'-O-methyl modified nucleotide with thiophosphate linkage
  modified_base 20: mod_base = OTHER; note = 2'-O-methyl modified nucleotide with thiophosphate linkage
  modified_base 21: mod_base = OTHER; note = 2'-O-methyl modified nucleotide
tgatgaccaagcttggcaggc

SEQ ID NO: 344 - RNA, 21 nt, synthetic construct
  source 1..21: mol_type = other RNA
  modified_base 1: mod_base = OTHER; note = 2'-O-methyl modified nucleotide with thiophosphate linkage
  modified_base 2: mod_base = OTHER; note = 2'-fluoro modified nucleotide with thiophosphate linkage
  modified_base 3: mod_base = OTHER; note = 2'-O-methyl modified nucleotide
  modified_base 4: mod_base = OTHER; note = 2'-O-methyl modified nucleotide
  modified_base 5: mod_base = OTHER; note = 2'-O-methyl modified nucleotide
  modified_base 6: mod_base = OTHER; note = 2'-O-methyl modified nucleotide
  modified_base 7: mod_base = OTHER; note = 2'-fluoro modified nucleotide
  modified_base 8: mod_base = OTHER; note = 2'-O-methyl modified nucleotide
  modified_base 9: mod_base = OTHER; note = 2'-O-methyl modified nucleotide
  modified_base 10: mod_base = OTHER; note = 2'-O-methyl modified nucleotide
  modified_base 11: mod_base = OTHER; note = 2'-O-methyl modified nucleotide
  modified_base 12: mod_base = OTHER; note = 2'-fluoro modified nucleotide
  modified_base 13: mod_base = OTHER; note = 2'-O-methyl modified nucleotide
  modified_base 14: mod_base = OTHER; note = 2'-fluoro modified nucleotide
  modified_base 15: mod_base = OTHER; note = 2'-O-methyl modified nucleotide
  modified_base 16: mod_base = OTHER; note = 2'-fluoro modified nucleotide
  modified_base 17: mod_base = OTHER; note = 2'-O-methyl modified nucleotide
  modified_base 18: mod_base = OTHER; note = 2'-O-methyl modified nucleotide
  modified_base 19: mod_base = OTHER; note = 2'-O-methyl modified nucleotide with thiophosphate linkage
  modified_base 20: mod_base = OTHER; note = 2'-O-methyl modified nucleotide with thiophosphate linkage
  modified_base 21: mod_base = OTHER; note = 2'-O-methyl modified nucleotide
tagatgaccaagcttggcagc

SEQ ID NO: 345 - RNA, 21 nt, synthetic construct
  source 1..21: mol_type = other RNA
  modified_base 1: mod_base = OTHER; note = 2'-O-methyl modified nucleotide with thiophosphate linkage
  modified_base 2: mod_base = OTHER; note = 2'-fluoro modified nucleotide with thiophosphate linkage
  modified_base 3: mod_base = OTHER; note = 2'-O-methyl modified nucleotide
  modified_base 4: mod_base = OTHER; note = 2'-O-methyl modified nucleotide
  modified_base 5: mod_base = OTHER; note = 2'-O-methyl modified nucleotide
  modified_base 6: mod_base = OTHER; note = 2'-O-methyl modified nucleotide
  modified_base 7: mod_base = OTHER; note = 2'-fluoro modified nucleotide
  modified_base 8: mod_base = OTHER; note = 2'-O-methyl modified nucleotide
  modified_base 9: mod_base = OTHER; note = 2'-O-methyl modified nucleotide
  modified_base 10: mod_base = OTHER; note = 2'-O-methyl modified nucleotide
  modified_base 11: mod_base = OTHER; note = 2'-O-methyl modified nucleotide
  modified_base 12: mod_base = OTHER; note = 2'-fluoro modified nucleotide
  modified_base 13: mod_base = OTHER; note = 2'-O-methyl modified nucleotide
  modified_base 14: mod_base = OTHER; note = 2'-fluoro modified nucleotide
  modified_base 15: mod_base = OTHER; note = 2'-O-methyl modified nucleotide
  modified_base 16: mod_base = OTHER; note = 2'-fluoro modified nucleotide
  modified_base 17: mod_base = OTHER; note = 2'-O-methyl modified nucleotide
  modified_base 18: mod_base = OTHER; note = 2'-O-methyl modified nucleotide
  modified_base 19: mod_base = OTHER; note = 2'-O-methyl modified nucleotide with thiophosphate linkage
  modified_base 20: mod_base = OTHER; note = 2'-O-methyl modified nucleotide with thiophosphate linkage
  modified_base 21: mod_base = OTHER; note = 2'-O-methyl modified nucleotide
tcatagatgaccaagcttggg

SEQ ID NO: 346 - RNA, 21 nt, synthetic construct
  source 1..21: mol_type = other RNA
  modified_base 1: mod_base = OTHER; note = 2'-O-methyl modified nucleotide with thiophosphate linkage
  modified_base 2: mod_base = OTHER; note = 2'-fluoro modified nucleotide with thiophosphate linkage
  modified_base 3: mod_base = OTHER; note = 2'-O-methyl modified nucleotide
  modified_base 4: mod_base = OTHER; note = 2'-O-methyl modified nucleotide
  modified_base 5: mod_base = OTHER; note = 2'-O-methyl modified nucleotide
  modified_base 6: mod_base = OTHER; note = 2'-O-methyl modified nucleotide
  modified_base 7: mod_base = OTHER; note = 2'-fluoro modified nucleotide
  modified_base 8: mod_base = OTHER; note = 2'-O-methyl modified nucleotide
  modified_base 9: mod_base = OTHER; note = 2'-O-methyl modified nucleotide
  modified_base 10: mod_base = OTHER; note = 2'-O-methyl modified nucleotide
  modified_base 11: mod_base = OTHER; note = 2'-O-methyl modified nucleotide
  modified_base 12: mod_base = OTHER; note = 2'-fluoro modified nucleotide
  modified_base 13: mod_base = OTHER; note = 2'-O-methyl modified nucleotide
  modified_base 14: mod_base = OTHER; note = 2'-fluoro modified nucleotide
  modified_base 15: mod_base = OTHER; note = 2'-O-methyl modified nucleotide
  modified_base 16: mod_base = OTHER; note = 2'-fluoro modified nucleotide
  modified_base 17: mod_base = OTHER; note = 2'-O-methyl modified nucleotide
  modified_base 18: mod_base = OTHER; note = 2'-O-methyl modified nucleotide
  modified_base 19: mod_base = OTHER; note = 2'-O-methyl modified nucleotide with thiophosphate linkage
  modified_base 20: mod_base = OTHER; note = 2'-O-methyl modified nucleotide with thiophosphate linkage
  modified_base 21: mod_base = OTHER; note = 2'-O-methyl modified nucleotide
tgtcatagatgaccaagcttc

SEQ ID NO: 347 - RNA, 21 nt, synthetic construct
  source 1..21: mol_type = other RNA
  modified_base 1: mod_base = OTHER; note = 2'-O-methyl modified nucleotide with thiophosphate linkage
  modified_base 2: mod_base = OTHER; note = 2'-fluoro modified nucleotide with thiophosphate linkage
  modified_base 3: mod_base = OTHER; note = 2'-O-methyl modified nucleotide
  modified_base 4: mod_base = OTHER; note = 2'-O-methyl modified nucleotide
  modified_base 5: mod_base = OTHER; note = 2'-O-methyl modified nucleotide
  modified_base 6: mod_base = OTHER; note = 2'-O-methyl modified nucleotide
  modified_base 7: mod_base = OTHER; note = 2'-fluoro modified nucleotide
  modified_base 8: mod_base = OTHER; note = 2'-O-methyl modified nucleotide
  modified_base 9: mod_base = OTHER; note = 2'-O-methyl modified nucleotide
  modified_base 10: mod_base = OTHER; note = 2'-O-methyl modified nucleotide
  modified_base 11: mod_base = OTHER; note = 2'-O-methyl modified nucleotide
  modified_base 12: mod_base = OTHER; note = 2'-fluoro modified nucleotide
  modified_base 13: mod_base = OTHER; note = 2'-O-methyl modified nucleotide
  modified_base 14: mod_base = OTHER; note = 2'-fluoro modified nucleotide
  modified_base 15: mod_base = OTHER; note = 2'-O-methyl modified nucleotide
  modified_base 16: mod_base = OTHER; note = 2'-fluoro modified nucleotide
  modified_base 17: mod_base = OTHER; note = 2'-O-methyl modified nucleotide
  modified_base 18: mod_base = OTHER; note = 2'-O-methyl modified nucleotide
  modified_base 19: mod_base = OTHER; note = 2'-O-methyl modified nucleotide with thiophosphate linkage
  modified_base 20: mod_base = OTHER; note = 2'-O-methyl modified nucleotide with thiophosphate linkage
  modified_base 21: mod_base = OTHER; note = 2'-O-methyl modified nucleotide
taagccagcatttgggtagtc

SEQ ID NO: 348 - RNA, 21 nt, synthetic construct
  source 1..21: mol_type = other RNA
  modified_base 1: mod_base = OTHER; note = 2'-O-methyl modified nucleotide with thiophosphate linkage
  modified_base 2: mod_base = OTHER; note = 2'-fluoro modified nucleotide with thiophosphate linkage
  modified_base 3: mod_base = OTHER; note = 2'-O-methyl modified nucleotide
  modified_base 4: mod_base = OTHER; note = 2'-O-methyl modified nucleotide
  modified_base 5: mod_base = OTHER; note = 2'-O-methyl modified nucleotide
  modified_base 6: mod_base = OTHER; note = 2'-O-methyl modified nucleotide
  modified_base 7: mod_base = OTHER; note = 2'-fluoro modified nucleotide
  modified_base 8: mod_base = OTHER; note = 2'-O-methyl modified nucleotide
  modified_base 9: mod_base = OTHER; note = 2'-O-methyl modified nucleotide
  modified_base 10: mod_base = OTHER; note = 2'-O-methyl modified nucleotide
  modified_base 11: mod_base = OTHER; note = 2'-O-methyl modified nucleotide
  modified_base 12: mod_base = OTHER; note = 2'-fluoro modified nucleotide
  modified_base 13: mod_base = OTHER; note = 2'-O-methyl modified nucleotide
  modified_base 14: mod_base = OTHER; note = 2'-fluoro modified nucleotide
  modified_base 15: mod_base = OTHER; note = 2'-O-methyl modified nucleotide
  modified_base 16: mod_base = OTHER; note = 2'-fluoro modified nucleotide
  modified_base 17: mod_base = OTHER; note = 2'-O-methyl modified nucleotide
  modified_base 18: mod_base = OTHER; note = 2'-O-methyl modified nucleotide
  modified_base 19: mod_base = OTHER; note = 2'-O-methyl modified nucleotide with thiophosphate linkage
  modified_base 20: mod_base = OTHER; note = 2'-O-methyl modified nucleotide with thiophosphate linkage
  modified_base 21: mod_base = OTHER; note = 2'-O-methyl modified nucleotide
ttcaagccagcatttgggtac

SEQ ID NO: 349 - RNA, 21 nt, synthetic construct
  source 1..21: mol_type = other RNA
  modified_base 1: mod_base = OTHER; note = 2'-O-methyl modified nucleotide with thiophosphate linkage
  modified_base 2: mod_base = OTHER; note = 2'-fluoro modified nucleotide with thiophosphate linkage
  modified_base 3: mod_base = OTHER; note = 2'-O-methyl modified nucleotide
  modified_base 4: mod_base = OTHER; note = 2'-O-methyl modified nucleotide
  modified_base 5: mod_base = OTHER; note = 2'-O-methyl modified nucleotide
  modified_base 6: mod_base = OTHER; note = 2'-O-methyl modified nucleotide
  modified_base 7: mod_base = OTHER; note = 2'-fluoro modified nucleotide
  modified_base 8: mod_base = OTHER; note = 2'-O-methyl modified nucleotide
  modified_base 9: mod_base = OTHER; note = 2'-O-methyl modified nucleotide
  modified_base 10: mod_base = OTHER; note = 2'-O-methyl modified nucleotide
  modified_base 11: mod_base = OTHER; note = 2'-O-methyl modified nucleotide
  modified_base 12: mod_base = OTHER; note = 2'-fluoro modified nucleotide
  modified_base 13: mod_base = OTHER; note = 2'-O-methyl modified nucleotide
  modified_base 14: mod_base = OTHER; note = 2'-fluoro modified nucleotide
  modified_base 15: mod_base = OTHER; note = 2'-O-methyl modified nucleotide
  modified_base 16: mod_base = OTHER; note = 2'-fluoro modified nucleotide
  modified_base 17: mod_base = OTHER; note = 2'-O-methyl modified nucleotide
  modified_base 18: mod_base = OTHER; note = 2'-O-methyl modified nucleotide
  modified_base 19: mod_base = OTHER; note = 2'-O-methyl modified nucleotide with thiophosphate linkage
  modified_base 20: mod_base = OTHER; note = 2'-O-methyl modified nucleotide with thiophosphate linkage
  modified_base 21: mod_base = OTHER; note = 2'-O-methyl modified nucleotide
tatcaagccagcatttgggtc

SEQ ID NO: 350 - RNA, 21 nt, synthetic construct
  source 1..21: mol_type = other RNA
  modified_base 1: mod_base = OTHER; note = 2'-O-methyl modified nucleotide with thiophosphate linkage
  modified_base 2: mod_base = OTHER; note = 2'-fluoro modified nucleotide with thiophosphate linkage
  modified_base 3: mod_base = OTHER; note = 2'-O-methyl modified nucleotide
  modified_base 4: mod_base = OTHER; note = 2'-O-methyl modified nucleotide
  modified_base 5: mod_base = OTHER; note = 2'-O-methyl modified nucleotide
  modified_base 6: mod_base = OTHER; note = 2'-O-methyl modified nucleotide
  modified_base 7: mod_base = OTHER; note = 2'-fluoro modified nucleotide
  modified_base 8: mod_base = OTHER; note = 2'-O-methyl modified nucleotide
  modified_base 9: mod_base = OTHER; note = 2'-O-methyl modified nucleotide
  modified_base 10: mod_base = OTHER; note = 2'-O-methyl modified nucleotide
  modified_base 11: mod_base = OTHER; note = 2'-O-methyl modified nucleotide
  modified_base 12: mod_base = OTHER; note = 2'-fluoro modified nucleotide
  modified_base 13: mod_base = OTHER; note = 2'-O-methyl modified nucleotide
  modified_base 14: mod_base = OTHER; note = 2'-fluoro modified nucleotide
  modified_base 15: mod_base = OTHER; note = 2'-O-methyl modified nucleotide
  modified_base 16: mod_base = OTHER; note = 2'-fluoro modified nucleotide
  modified_base 17: mod_base = OTHER; note = 2'-O-methyl modified nucleotide
  modified_base 18: mod_base = OTHER; note = 2'-O-methyl modified nucleotide
  modified_base 19: mod_base = OTHER; note = 2'-O-methyl modified nucleotide with thiophosphate linkage
  modified_base 20: mod_base = OTHER; note = 2'-O-methyl modified nucleotide with thiophosphate linkage
  modified_base 21: mod_base = OTHER; note = 2'-O-methyl modified nucleotide
ttcgtataacaataaggagcc

SEQ ID NO: 351 - RNA, 21 nt, synthetic construct
  source 1..21: mol_type = other RNA
  modified_base 1: mod_base = OTHER; note = 2'-O-methyl modified nucleotide with thiophosphate linkage
  modified_base 2: mod_base = OTHER; note = 2'-fluoro modified nucleotide with thiophosphate linkage
  modified_base 3: mod_base = OTHER; note = 2'-O-methyl modified nucleotide
  modified_base 4: mod_base = OTHER; note = 2'-O-methyl modified nucleotide
  modified_base 5: mod_base = OTHER; note = 2'-O-methyl modified nucleotide
  modified_base 6: mod_base = OTHER; note = 2'-O-methyl modified nucleotide
  modified_base 7: mod_base = OTHER; note = 2'-fluoro modified nucleotide
  modified_base 8: mod_base = OTHER; note = 2'-O-methyl modified nucleotide
  modified_base 9: mod_base = OTHER; note = 2'-O-methyl modified nucleotide
  modified_base 10: mod_base = OTHER; note = 2'-O-methyl modified nucleotide
  modified_base 11: mod_base = OTHER; note = 2'-O-methyl modified nucleotide
  modified_base 12: mod_base = OTHER; note = 2'-fluoro modified nucleotide
  modified_base 13: mod_base = OTHER; note = 2'-O-methyl modified nucleotide
  modified_base 14: mod_base = OTHER; note = 2'-fluoro modified nucleotide
  modified_base 15: mod_base = OTHER; note = 2'-O-methyl modified nucleotide
  modified_base 16: mod_base = OTHER; note = 2'-fluoro modified nucleotide
  modified_base 17: mod_base = OTHER; note = 2'-O-methyl modified nucleotide
  modified_base 18: mod_base = OTHER; note = 2'-O-methyl modified nucleotide
  modified_base 19: mod_base = OTHER; note = 2'-O-methyl modified nucleotide with thiophosphate linkage
  modified_base 20: mod_base = OTHER; note = 2'-O-methyl modified nucleotide with thiophosphate linkage
  modified_base 21: mod_base = OTHER; note = 2'-O-methyl modified nucleotide
ttcggaaggagcctctaggcc

SEQ ID NO: 352 - RNA, 21 nt, synthetic construct
  source 1..21: mol_type = other RNA
  modified_base 1: mod_base = OTHER; note = 2'-O-methyl modified nucleotide with thiophosphate linkage
  modified_base 2: mod_base = OTHER; note = 2'-fluoro modified nucleotide with thiophosphate linkage
  modified_base 3: mod_base = OTHER; note = 2'-O-methyl modified nucleotide
  modified_base 4: mod_base = OTHER; note = 2'-O-methyl modified nucleotide
  modified_base 5: mod_base = OTHER; note = 2'-O-methyl modified nucleotide
  modified_base 6: mod_base = OTHER; note = 2'-O-methyl modified nucleotide
  modified_base 7: mod_base = OTHER; note = 2'-fluoro modified nucleotide
  modified_base 8: mod_base = OTHER; note = 2'-O-methyl modified nucleotide
  modified_base 9: mod_base = OTHER; note = 2'-O-methyl modified nucleotide
  modified_base 10: mod_base = OTHER; note = 2'-O-methyl modified nucleotide
  modified_base 11: mod_base = OTHER; note = 2'-O-methyl modified nucleotide
  modified_base 12: mod_base = OTHER; note = 2'-fluoro modified nucleotide
  modified_base 13: mod_base = OTHER; note = 2'-O-methyl modified nucleotide
  modified_base 14: mod_base = OTHER; note = 2'-fluoro modified nucleotide
  modified_base 15: mod_base = OTHER; note = 2'-O-methyl modified nucleotide
  modified_base 16: mod_base = OTHER; note = 2'-fluoro modified nucleotide
  modified_base 17: mod_base = OTHER; note = 2'-O-methyl modified nucleotide
  modified_base 18: mod_base = OTHER; note = 2'-O-methyl modified nucleotide
  modified_base 19: mod_base = OTHER; note = 2'-O-methyl modified nucleotide with thiophosphate linkage
  modified_base 20: mod_base = OTHER; note = 2'-O-methyl modified nucleotide with thiophosphate linkage
  modified_base 21: mod_base = OTHER; note = 2'-O-methyl modified nucleotide
ttgttcggaaggagcctctac

SEQ ID NO: 353 - RNA, 21 nt, synthetic construct
  source 1..21: mol_type = other RNA
  modified_base 1: mod_base = OTHER; note = 2'-O-methyl modified nucleotide with thiophosphate linkage
  modified_base 2: mod_base = OTHER; note = 2'-fluoro modified nucleotide with thiophosphate linkage
  modified_base 3: mod_base = OTHER; note = 2'-O-methyl modified nucleotide
  modified_base 4: mod_base = OTHER; note = 2'-O-methyl modified nucleotide
  modified_base 5: mod_base = OTHER; note = 2'-O-methyl modified nucleotide
  modified_base 6: mod_base = OTHER; note = 2'-O-methyl modified nucleotide
  modified_base 7: mod_base = OTHER; note = 2'-fluoro modified nucleotide
  modified_base 8: mod_base = OTHER; note = 2'-O-methyl modified nucleotide
  modified_base 9: mod_base = OTHER; note = 2'-O-methyl modified nucleotide
  modified_base 10: mod_base = OTHER; note = 2'-O-methyl modified nucleotide
  modified_base 11: mod_base = OTHER; note = 2'-O-methyl modified nucleotide
  modified_base 12: mod_base = OTHER; note = 2'-fluoro modified nucleotide
  modified_base 13: mod_base = OTHER; note = 2'-O-methyl modified nucleotide
  modified_base 14: mod_base = OTHER; note = 2'-fluoro modified nucleotide
  modified_base 15: mod_base = OTHER; note = 2'-O-methyl modified nucleotide
  modified_base 16: mod_base = OTHER; note = 2'-fluoro modified nucleotide
  modified_base 17: mod_base = OTHER; note = 2'-O-methyl modified nucleotide
  modified_base 18: mod_base = OTHER; note = 2'-O-methyl modified nucleotide
  modified_base 19: mod_base = OTHER; note = 2'-O-methyl modified nucleotide with thiophosphate linkage
  modified_base 20: mod_base = OTHER; note = 2'-O-methyl modified nucleotide with thiophosphate linkage
  modified_base 21: mod_base = OTHER; note = 2'-O-methyl modified nucleotide
tctttgctcagtcggtgcttc

SEQ ID NO: 354 - RNA, 21 nt, synthetic construct
  source 1..21: mol_type = other RNA
  modified_base 1: mod_base = OTHER; note = 2'-O-methyl modified nucleotide with thiophosphate linkage
  modified_base 2: mod_base = OTHER; note = 2'-fluoro modified nucleotide with thiophosphate linkage
  modified_base 3: mod_base = OTHER; note = 2'-O-methyl modified nucleotide
  modified_base 4: mod_base = OTHER; note = 2'-O-methyl modified nucleotide
  modified_base 5: mod_base = OTHER; note = 2'-O-methyl modified nucleotide
  modified_base 6: mod_base = OTHER; note = 2'-O-methyl modified nucleotide
  modified_base 7: mod_base = OTHER; note = 2'-fluoro modified nucleotide
  modified_base 8: mod_base = OTHER; note = 2'-O-methyl modified nucleotide
  modified_base 9: mod_base = OTHER; note = 2'-O-methyl modified nucleotide
  modified_base 10: mod_base = OTHER; note = 2'-O-methyl modified nucleotide
  modified_base 11: mod_base = OTHER; note = 2'-O-methyl modified nucleotide
  modified_base 12: mod_base = OTHER; note = 2'-fluoro modified nucleotide
  modified_base 13: mod_base = OTHER; note = 2'-O-methyl modified nucleotide
  modified_base 14: mod_base = OTHER; note = 2'-fluoro modified nucleotide
  modified_base 15: mod_base = OTHER; note = 2'-O-methyl modified nucleotide
  modified_base 16: mod_base = OTHER; note = 2'-fluoro modified nucleotide
  modified_base 17: mod_base = OTHER; note = 2'-O-methyl modified nucleotide
  modified_base 18: mod_base = OTHER; note = 2'-O-methyl modified nucleotide
  modified_base 19: mod_base = OTHER; note = 2'-O-methyl modified nucleotide with thiophosphate linkage
  modified_base 20: mod_base = OTHER; note = 2'-O-methyl modified nucleotide with thiophosphate linkage
  modified_base 21: mod_base = OTHER; note = 2'-O-methyl modified nucleotide
tcattaccatggtagcactcg

SEQ ID NO: 355 - RNA, 21 nt, synthetic construct
  source 1..21: mol_type = other RNA
  modified_base 1: mod_base = OTHER; note = 2'-O-methyl modified nucleotide with thiophosphate linkage
  modified_base 2: mod_base = OTHER; note = 2'-fluoro modified nucleotide with thiophosphate linkage
  modified_base 3: mod_base = OTHER; note = 2'-O-methyl modified nucleotide
  modified_base 4: mod_base = OTHER; note = 2'-O-methyl modified nucleotide
  modified_base 5: mod_base = OTHER; note = 2'-O-methyl modified nucleotide
  modified_base 6: mod_base = OTHER; note = 2'-O-methyl modified nucleotide
  modified_base 7: mod_base = OTHER; note = 2'-fluoro modified nucleotide
  modified_base 8: mod_base = OTHER; note = 2'-O-methyl modified nucleotide
  modified_base 9: mod_base = OTHER; note = 2'-O-methyl modified nucleotide
  modified_base 10: mod_base = OTHER; note = 2'-O-methyl modified nucleotide
  modified_base 11: mod_base = OTHER; note = 2'-O-methyl modified nucleotide
  modified_base 12: mod_base = OTHER; note = 2'-fluoro modified nucleotide
  modified_base 13: mod_base = OTHER; note = 2'-O-methyl modified nucleotide
  modified_base 14: mod_base = OTHER; note = 2'-fluoro modified nucleotide
  modified_base 15: mod_base = OTHER; note = 2'-O-methyl modified nucleotide
  modified_base 16: mod_base = OTHER; note = 2'-fluoro modified nucleotide
  modified_base 17: mod_base = OTHER; note = 2'-O-methyl modified nucleotide
  modified_base 18: mod_base = OTHER; note = 2'-O-methyl modified nucleotide
  modified_base 19: mod_base = OTHER; note = 2'-O-methyl modified nucleotide with thiophosphate linkage
  modified_base 20: mod_base = OTHER; note = 2'-O-methyl modified nucleotide with thiophosphate linkage
  modified_base 21: mod_base = OTHER; note = 2'-O-methyl modified nucleotide
ttccattaccatggtagcacc

SEQ ID NO: 356 - RNA, 21 nt, synthetic construct
  source 1..21: mol_type = other RNA
  modified_base 1: mod_base = OTHER; note = 2'-O-methyl modified nucleotide with thiophosphate linkage
  modified_base 2: mod_base = OTHER; note = 2'-fluoro modified nucleotide with thiophosphate linkage
  modified_base 3: mod_base = OTHER; note = 2'-O-methyl modified nucleotide
  modified_base 4: mod_base = OTHER; note = 2'-O-methyl modified nucleotide
  modified_base 5: mod_base = OTHER; note = 2'-O-methyl modified nucleotide
  modified_base 6: mod_base = OTHER; note = 2'-O-methyl modified nucleotide
  modified_base 7: mod_base = OTHER; note = 2'-fluoro modified nucleotide
  modified_base 8: mod_base = OTHER; note = 2'-O-methyl modified nucleotide
  modified_base 9: mod_base = OTHER; note = 2'-O-methyl modified nucleotide
  modified_base 10: mod_base = OTHER; note = 2'-O-methyl modified nucleotide
  modified_base 11: mod_base = OTHER; note = 2'-O-methyl modified nucleotide
  modified_base 12: mod_base = OTHER; note = 2'-fluoro modified nucleotide
  modified_base 13: mod_base = OTHER; note = 2'-O-methyl modified nucleotide
  modified_base 14: mod_base = OTHER; note = 2'-fluoro modified nucleotide
  modified_base 15: mod_base = OTHER; note = 2'-O-methyl modified nucleotide
  modified_base 16: mod_base = OTHER; note = 2'-fluoro modified nucleotide
  modified_base 17: mod_base = OTHER; note = 2'-O-methyl modified nucleotide
  modified_base 18: mod_base = OTHER; note = 2'-O-methyl modified nucleotide
  modified_base 19: mod_base = OTHER; note = 2'-O-methyl modified nucleotide with thiophosphate linkage
  modified_base 20: mod_base = OTHER; note = 2'-O-methyl modified nucleotide with thiophosphate linkage
  modified_base 21: mod_base = OTHER; note = 2'-O-methyl modified nucleotide
tctctgtccattaccatggtc

SEQ ID NO: 357 - RNA, 21 nt, synthetic construct
  source 1..21: mol_type = other RNA
  modified_base 1: mod_base = OTHER; note = 2'-O-methyl modified nucleotide with thiophosphate linkage
  modified_base 2: mod_base = OTHER; note = 2'-fluoro modified nucleotide with thiophosphate linkage
  modified_base 3: mod_base = OTHER; note = 2'-O-methyl modified nucleotide
  modified_base 4: mod_base = OTHER; note = 2'-O-methyl modified nucleotide
  modified_base 5: mod_base = OTHER; note = 2'-O-methyl modified nucleotide
  modified_base 6: mod_base = OTHER; note = 2'-O-methyl modified nucleotide
  modified_base 7: mod_base = OTHER; note = 2'-fluoro modified nucleotide
  modified_base 8: mod_base = OTHER; note = 2'-O-methyl modified nucleotide
  modified_base 9: mod_base = OTHER; note = 2'-O-methyl modified nucleotide
  modified_base 10: mod_base = OTHER; note = 2'-O-methyl modified nucleotide
  modified_base 11: mod_base = OTHER; note = 2'-O-methyl modified nucleotide
  modified_base 12: mod_base = OTHER; note = 2'-fluoro modified nucleotide
  modified_base 13: mod_base = OTHER; note = 2'-O-methyl modified nucleotide
  modified_base 14: mod_base = OTHER; note = 2'-fluoro modified nucleotide
  modified_base 15: mod_base = OTHER; note = 2'-O-methyl modified nucleotide
  modified_base 16: mod_base = OTHER; note = 2'-fluoro modified nucleotide
  modified_base 17: mod_base = OTHER; note = 2'-O-methyl modified nucleotide
  modified_base 18: mod_base = OTHER; note = 2'-O-methyl modified nucleotide
  modified_base 19: mod_base = OTHER; note = 2'-O-methyl modified nucleotide with thiophosphate linkage
  modified_base 20: mod_base = OTHER; note = 2'-O-methyl modified nucleotide with thiophosphate linkage
  modified_base 21: mod_base = OTHER; note = 2'-O-methyl modified nucleotide
tataactctgtccattaccac

SEQ ID NO: 358 - RNA, 21 nt, synthetic construct
  source 1..21: mol_type = other RNA
  modified_base 1: mod_base = OTHER; note = 2'-O-methyl modified nucleotide with thiophosphate linkage
  modified_base 2: mod_base = OTHER; note = 2'-fluoro modified nucleotide with thiophosphate linkage
  modified_base 3: mod_base = OTHER; note = 2'-O-methyl modified nucleotide
  modified_base 4: mod_base = OTHER; note = 2'-O-methyl modified nucleotide
  modified_base 5: mod_base = OTHER; note = 2'-O-methyl modified nucleotide
  modified_base 6: mod_base = OTHER; note = 2'-O-methyl modified nucleotide
  modified_base 7: mod_base = OTHER; note = 2'-fluoro modified nucleotide
  modified_base 8: mod_base = OTHER; note = 2'-O-methyl modified nucleotide
  modified_base 9: mod_base = OTHER; note = 2'-O-methyl modified nucleotide
  modified_base 10: mod_base = OTHER; note = 2'-O-methyl modified nucleotide
  modified_base 11: mod_base = OTHER; note = 2'-O-methyl modified nucleotide
  modified_base 12: mod_base = OTHER; note = 2'-fluoro modified nucleotide
  modified_base 13: mod_base = OTHER; note = 2'-O-methyl modified nucleotide
  modified_base 14: mod_base = OTHER; note = 2'-fluoro modified nucleotide
  modified_base 15: mod_base = OTHER; note = 2'-O-methyl modified nucleotide
  modified_base 16: mod_base = OTHER; note = 2'-fluoro modified nucleotide
  modified_base 17: mod_base = OTHER; note = 2'-O-methyl modified nucleotide
  modified_base 18: mod_base = OTHER; note = 2'-O-methyl modified nucleotide
  modified_base 19: mod_base = OTHER; note = 2'-O-methyl modified nucleotide with thiophosphate linkage
  modified_base 20: mod_base = OTHER; note = 2'-O-methyl modified nucleotide with thiophosphate linkage
  modified_base 21: mod_base = OTHER; note = 2'-O-methyl modified nucleotide
tgataactctgtccattaccc

SEQ ID NO: 359 - RNA, 21 nt, synthetic construct
  source 1..21: mol_type = other RNA
  modified_base 1: mod_base = OTHER; note = 2'-O-methyl modified nucleotide with thiophosphate linkage
  modified_base 2: mod_base = OTHER; note = 2'-fluoro modified nucleotide with thiophosphate linkage
  modified_base 3: mod_base = OTHER; note = 2'-O-methyl modified nucleotide
  modified_base 4: mod_base = OTHER; note = 2'-O-methyl modified nucleotide
  modified_base 5: mod_base = OTHER; note = 2'-O-methyl modified nucleotide
  modified_base 6: mod_base = OTHER; note = 2'-O-methyl modified nucleotide
  modified_base 7: mod_base = OTHER; note = 2'-fluoro modified nucleotide
  modified_base 8: mod_base = OTHER; note = 2'-O-methyl modified nucleotide
  modified_base 9: mod_base = OTHER; note = 2'-O-methyl modified nucleotide
  modified_base 10: mod_base = OTHER; note = 2'-O-methyl modified nucleotide
  modified_base 11: mod_base = OTHER; note = 2'-O-methyl modified nucleotide
  modified_base 12: mod_base = OTHER; note = 2'-fluoro modified nucleotide
  modified_base 13: mod_base = OTHER; note = 2'-O-methyl modified nucleotide
  modified_base 14: mod_base = OTHER; note = 2'-fluoro modified nucleotide
  modified_base 15: mod_base = OTHER; note = 2'-O-methyl modified nucleotide
  modified_base 16: mod_base = OTHER; note = 2'-fluoro modified nucleotide
  modified_base 17: mod_base = OTHER; note = 2'-O-methyl modified nucleotide
  modified_base 18: mod_base = OTHER; note = 2'-O-methyl modified nucleotide
  modified_base 19: mod_base = OTHER; note = 2'-O-methyl modified nucleotide with thiophosphate linkage
  modified_base 20: mod_base = OTHER; note = 2'-O-methyl modified nucleotide with thiophosphate linkage
  modified_base 21: mod_base = OTHER; note = 2'-O-methyl modified nucleotide
ttcgataactctgtccattag

SEQ ID NO: 360 - RNA, 21 nt, synthetic construct
  source 1..21: mol_type = other RNA
  modified_base 1: mod_base = OTHER; note = 2'-O-methyl modified nucleotide with thiophosphate linkage
  modified_base 2: mod_base = OTHER; note = 2'-fluoro modified nucleotide with thiophosphate linkage
  modified_base 3: mod_base = OTHER; note = 2'-O-methyl modified nucleotide
  modified_base 4: mod_base = OTHER; note = 2'-O-methyl modified nucleotide
  modified_base 5: mod_base = OTHER; note = 2'-O-methyl modified nucleotide
  modified_base 6: mod_base = OTHER; note = 2'-O-methyl modified nucleotide
  modified_base 7: mod_base = OTHER; note = 2'-fluoro modified nucleotide
  modified_base 8: mod_base = OTHER; note = 2'-O-methyl modified nucleotide
  modified_base 9: mod_base = OTHER; note = 2'-O-methyl modified nucleotide
  modified_base 10: mod_base = OTHER; note = 2'-O-methyl modified nucleotide
  modified_base 11: mod_base = OTHER; note = 2'-O-methyl modified nucleotide
  modified_base 12: mod_base = OTHER; note = 2'-fluoro modified nucleotide
  modified_base 13: mod_base = OTHER; note = 2'-O-methyl modified nucleotide
  modified_base 14: mod_base = OTHER; note = 2'-fluoro modified nucleotide
  modified_base 15: mod_base = OTHER; note = 2'-O-methyl modified nucleotide
  modified_base 16: mod_base = OTHER; note = 2'-fluoro modified nucleotide
  modified_base 17: mod_base = OTHER; note = 2'-O-methyl modified nucleotide
  modified_base 18: mod_base = OTHER; note = 2'-O-methyl modified nucleotide
  modified_base 19: mod_base = OTHER; note = 2'-O-methyl modified nucleotide with thiophosphate linkage
  modified_base 20: mod_base = OTHER; note = 2'-O-methyl modified nucleotide with thiophosphate linkage
  modified_base 21: mod_base = OTHER; note = 2'-O-methyl modified nucleotide
ttatgtgcctcgataactctc

SEQ ID NO: 361 - RNA, 21 nt, synthetic construct
  source 1..21: mol_type = other RNA
  modified_base 1: mod_base = OTHER; note = 2'-O-methyl modified nucleotide with thiophosphate linkage
  modified_base 2: mod_base = OTHER; note = 2'-fluoro modified nucleotide with thiophosphate linkage
  modified_base 3: mod_base = OTHER; note = 2'-O-methyl modified nucleotide
  modified_base 4: mod_base = OTHER; note = 2'-O-methyl modified nucleotide
  modified_base 5: mod_base = OTHER; note = 2'-O-methyl modified nucleotide
  modified_base 6: mod_base = OTHER; note = 2'-O-methyl modified nucleotide
  modified_base 7: mod_base = OTHER; note = 2'-fluoro modified nucleotide
  modified_base 8: mod_base = OTHER; note = 2'-O-methyl modified nucleotide
  modified_base 9: mod_base = OTHER; note = 2'-O-methyl modified nucleotide
  modified_base 10: mod_base = OTHER; note = 2'-O-methyl modified nucleotide
  modified_base 11: mod_base = OTHER; note = 2'-O-methyl modified nucleotide
  modified_base 12: mod_base = OTHER; note = 2'-fluoro modified nucleotide
  modified_base 13: mod_base = OTHER; note = 2'-O-methyl modified nucleotide
  modified_base 14: mod_base = OTHER; note = 2'-fluoro modified nucleotide
  modified_base 15: mod_base = OTHER; note = 2'-O-methyl modified nucleotide
  modified_base 16: mod_base = OTHER; note = 2'-fluoro modified nucleotide
  modified_base 17: mod_base = OTHER; note = 2'-O-methyl modified nucleotide
  modified_base 18: mod_base = OTHER; note = 2'-O-methyl modified nucleotide
  modified_base 19: mod_base = OTHER; note = 2'-O-methyl modified nucleotide with thiophosphate linkage
  modified_base 20: mod_base = OTHER; note = 2'-O-methyl modified nucleotide with thiophosphate linkage
  modified_base 21: mod_base = OTHER; note = 2'-O-methyl modified nucleotide
tagtatgtgcctcgataactg

SEQ ID NO: 362 - RNA, 21 nt, synthetic construct
  source 1..21: mol_type = other RNA
  modified_base 1: mod_base = OTHER; note = 2'-O-methyl modified nucleotide with thiophosphate linkage
  modified_base 2: mod_base = OTHER; note = 2'-fluoro modified nucleotide with thiophosphate linkage
  modified_base 3: mod_base = OTHER; note = 2'-O-methyl modified nucleotide
  modified_base 4: mod_base = OTHER; note = 2'-O-methyl modified nucleotide
  modified_base 5: mod_base = OTHER; note = 2'-O-methyl modified nucleotide
  modified_base 6: mod_base = OTHER; note = 2'-O-methyl modified nucleotide
  modified_base 7: mod_base = OTHER; note = 2'-fluoro modified nucleotide
  modified_base 8: mod_base = OTHER; note = 2'-O-methyl modified nucleotide
  modified_base 9: mod_base = OTHER; note = 2'-O-methyl modified nucleotide
  modified_base 10: mod_base = OTHER; note = 2'-O-methyl modified nucleotide
  modified_base 11: mod_base = OTHER; note = 2'-O-methyl modified nucleotide
  modified_base 12: mod_base = OTHER; note = 2'-fluoro modified nucleotide
  modified_base 13: mod_base = OTHER; note = 2'-O-methyl modified nucleotide
  modified_base 14: mod_base = OTHER; note = 2'-fluoro modified nucleotide
  modified_base 15: mod_base = OTHER; note = 2'-O-methyl modified nucleotide
  modified_base 16: mod_base = OTHER; note = 2'-fluoro modified nucleotide
  modified_base 17: mod_base = OTHER; note = 2'-O-methyl modified nucleotide
  modified_base 18: mod_base = OTHER; note = 2'-O-methyl modified nucleotide
  modified_base 19: mod_base = OTHER; note = 2'-O-methyl modified nucleotide with thiophosphate linkage
  modified_base 20: mod_base = OTHER; note = 2'-O-methyl modified nucleotide with thiophosphate linkage
  modified_base 21: mod_base = OTHER; note = 2'-O-methyl modified nucleotide
tctctgtccattaccgtggtc

SEQ ID NO: 363 - RNA, 21 nt, synthetic construct
  source 1..21: mol_type = other RNA
  modified_base 1: mod_base = OTHER; note = 2'-O-methyl modified nucleotide with thiophosphate linkage
  modified_base 2: mod_base = OTHER; note = 2'-fluoro modified nucleotide with thiophosphate linkage
  modified_base 3: mod_base = OTHER; note = 2'-O-methyl modified nucleotide
  modified_base 4: mod_base = OTHER; note = 2'-O-methyl modified nucleotide
  modified_base 5: mod_base = OTHER; note = 2'-O-methyl modified nucleotide
  modified_base 6: mod_base = OTHER; note = 2'-O-methyl modified nucleotide
  modified_base 7: mod_base = OTHER; note = 2'-fluoro modified nucleotide
  modified_base 8: mod_base = OTHER; note = 2'-O-methyl modified nucleotide
  modified_base 9: mod_base = OTHER; note = 2'-O-methyl modified nucleotide
  modified_base 10: mod_base = OTHER; note = 2'-O-methyl modified nucleotide
  modified_base 11: mod_base = OTHER; note = 2'-O-methyl modified nucleotide
  modified_base 12: mod_base = OTHER; note = 2'-fluoro modified nucleotide
  modified_base 13: mod_base = OTHER; note = 2'-O-methyl modified nucleotide
  modified_base 14: mod_base = OTHER; note = 2'-fluoro modified nucleotide
  modified_base 15: mod_base = OTHER; note = 2'-O-methyl modified nucleotide
  modified_base 16: mod_base = OTHER; note = 2'-fluoro modified nucleotide
  modified_base 17: mod_base = OTHER; note = 2'-O-methyl modified nucleotide
  modified_base 18: mod_base = OTHER; note = 2'-O-methyl modified nucleotide
  modified_base 19: mod_base = OTHER; note = 2'-O-methyl modified nucleotide with thiophosphate linkage
  modified_base 20: mod_base = OTHER; note = 2'-O-methyl modified nucleotide with thiophosphate linkage
  modified_base 21: mod_base = OTHER; note = 2'-O-methyl modified nucleotide
tggatctggattcctgcagtc

SEQ ID NO: 364 - RNA, 21 nt, synthetic construct
  source 1..21: mol_type = other RNA
  modified_base 1: mod_base = OTHER; note = 2'-O-methyl modified nucleotide with thiophosphate linkage
  modified_base 2: mod_base = OTHER; note = 2'-fluoro modified nucleotide with thiophosphate linkage
  modified_base 3: mod_base = OTHER; note = 2'-O-methyl modified nucleotide
  modified_base 4: mod_base = OTHER; note = 2'-O-methyl modified nucleotide
  modified_base 5: mod_base = OTHER; note = 2'-O-methyl modified nucleotide
  modified_base 6: mod_base = OTHER; note = 2'-O-methyl modified nucleotide
  modified_base 7: mod_base = OTHER; note = 2'-fluoro modified nucleotide
  modified_base 8: mod_base = OTHER; note = 2'-O-methyl modified nucleotide
  modified_base 9: mod_base = OTHER; note = 2'-O-methyl modified nucleotide
  modified_base 10: mod_base = OTHER; note = 2'-O-methyl modified nucleotide
  modified_base 11: mod_base = OTHER; note = 2'-O-methyl modified nucleotide
  modified_base 12: mod_base = OTHER; note = 2'-fluoro modified nucleotide
  modified_base 13: mod_base = OTHER; note = 2'-O-methyl modified nucleotide
  modified_base 14: mod_base = OTHER; note = 2'-fluoro modified nucleotide
  modified_base 15: mod_base = OTHER; note = 2'-O-methyl modified nucleotide
  modified_base 16: mod_base = OTHER; note = 2'-fluoro modified nucleotide
  modified_base 17: mod_base = OTHER; note = 2'-O-methyl modified nucleotide
  modified_base 18: mod_base = OTHER; note = 2'-O-methyl modified nucleotide
  modified_base 19: mod_base = OTHER; note = 2'-O-methyl modified nucleotide with thiophosphate linkage
  modified_base 20: mod_base = OTHER; note = 2'-O-methyl modified nucleotide with thiophosphate linkage
  modified_base 21: mod_base = OTHER; note = 2'-O-methyl modified nucleotide
tataacaataaggggctgccc

SEQ ID NO: 365 - RNA, 21 nt, synthetic construct
  source 1..21: mol_type = other RNA
  modified_base 1: mod_base = OTHER; note = 2'-O-methyl modified nucleotide with thiophosphate linkage
  modified_base 2: mod_base = OTHER; note = 2'-fluoro modified nucleotide with thiophosphate linkage
  modified_base 3: mod_base = OTHER; note = 2'-O-methyl modified nucleotide
  modified_base 4: mod_base = OTHER; note = 2'-O-methyl modified nucleotide
  modified_base 5: mod_base = OTHER; note = 2'-O-methyl modified nucleotide
  modified_base 6: mod_base = OTHER; note = 2'-O-methyl modified nucleotide
  modified_base 7: mod_base = OTHER; note = 2'-fluoro modified nucleotide
  modified_base 8: mod_base = OTHER; note = 2'-O-methyl modified nucleotide
  modified_base 9: mod_base = OTHER; note = 2'-O-methyl modified nucleotide
  modified_base 10: mod_base = OTHER; note = 2'-O-methyl modified nucleotide
  modified_base 11: mod_base = OTHER; note = 2'-O-methyl modified nucleotide
  modified_base 12: mod_base = OTHER; note = 2'-fluoro modified nucleotide
  modified_base 13: mod_base = OTHER; note = 2'-O-methyl modified nucleotide
  modified_base 14: mod_base = OTHER; note = 2'-fluoro modified nucleotide
  modified_base 15: mod_base = OTHER; note = 2'-O-methyl modified nucleotide
  modified_base 16: mod_base = OTHER; note = 2'-fluoro modified nucleotide
  modified_base 17: mod_base = OTHER; note = 2'-O-methyl modified nucleotide
  modified_base 18: mod_base = OTHER; note = 2'-O-methyl modified nucleotide
  modified_base 19: mod_base = OTHER; note = 2'-O-methyl modified nucleotide with thiophosphate linkage
  modified_base 20: mod_base = OTHER; note = 2'-O-methyl modified nucleotide with thiophosphate linkage
  modified_base 21: mod_base = OTHER; note = 2'-O-methyl modified nucleotide
tcgtataacaataaggggctc

SEQ ID NO: 366 - RNA, 21 nt, synthetic construct
  source 1..21: mol_type = other RNA
  modified_base 1: mod_base = OTHER; note = 2'-O-methyl modified nucleotide with thiophosphate linkage
  modified_base 2: mod_base = OTHER; note = 2'-fluoro modified nucleotide with thiophosphate linkage
  modified_base 3: mod_base = OTHER; note = 2'-O-methyl modified nucleotide
  modified_base 4: mod_base = OTHER; note = 2'-O-methyl modified nucleotide
  modified_base 5: mod_base = OTHER; note = 2'-O-methyl modified nucleotide
  modified_base 6: mod_base = OTHER; note = 2'-O-methyl modified nucleotide
  modified_base 7: mod_base = OTHER; note = 2'-fluoro modified nucleotide
  modified_base 8: mod_base = OTHER; note = 2'-O-methyl modified nucleotide
  modified_base 9: mod_base = OTHER; note = 2'-O-methyl modified nucleotide
  modified_base 10: mod_base = OTHER; note = 2'-O-methyl modified nucleotide
  modified_base 11: mod_base = OTHER; note = 2'-O-methyl modified nucleotide
  modified_base 12: mod_base = OTHER; note = 2'-fluoro modified nucleotide
  modified_base 13: mod_base = OTHER; note = 2'-O-methyl modified nucleotide
  modified_base 14: mod_base = OTHER; note = 2'-fluoro modified nucleotide
  modified_base 15: mod_base = OTHER; note = 2'-O-methyl modified nucleotide
  modified_base 16: mod_base = OTHER; note = 2'-fluoro modified nucleotide
  modified_base 17: mod_base = OTHER; note = 2'-O-methyl modified nucleotide
  modified_base 18: mod_base = OTHER; note = 2'-O-methyl modified nucleotide
  modified_base 19: mod_base = OTHER; note = 2'-O-methyl modified nucleotide with thiophosphate linkage
  modified_base 20: mod_base = OTHER; note = 2'-O-methyl modified nucleotide with thiophosphate linkage
  modified_base 21: mod_base = OTHER; note = 2'-O-methyl modified nucleotide
tgtactcccacctgacactgc

SEQ ID NO: 367 - RNA, 21 nt, synthetic construct
  source 1..21: mol_type = other RNA
  modified_base 1: mod_base = OTHER; note = 2'-O-methyl modified nucleotide with thiophosphate linkage
  modified_base 2: mod_base = OTHER; note = 2'-fluoro modified nucleotide with thiophosphate linkage
  modified_base 3: mod_base = OTHER; note = 2'-O-methyl modified nucleotide
  modified_base 4: mod_base = OTHER; note = 2'-O-methyl modified nucleotide
  modified_base 5: mod_base = OTHER; note = 2'-O-methyl modified nucleotide
  modified_base 6: mod_base = OTHER; note = 2'-O-methyl modified nucleotide
  modified_base 7: mod_base = OTHER; note = 2'-fluoro modified nucleotide
  modified_base 8: mod_base = OTHER; note = 2'-O-methyl modified nucleotide
  modified_base 9: mod_base = OTHER; note = 2'-O-methyl modified nucleotide
  modified_base 10: mod_base = OTHER; note = 2'-O-methyl modified nucleotide
  modified_base 11: mod_base = OTHER; note = 2'-O-methyl modified nucleotide
  modified_base 12: mod_base = OTHER; note = 2'-fluoro modified nucleotide
  modified_base 13: mod_base = OTHER; note = 2'-O-methyl modified nucleotide
  modified_base 14: mod_base = OTHER; note = 2'-fluoro modified nucleotide
  modified_base 15: mod_base = OTHER; note = 2'-O-methyl modified nucleotide
  modified_base 16: mod_base = OTHER; note = 2'-fluoro modified nucleotide
  modified_base 17: mod_base = OTHER; note = 2'-O-methyl modified nucleotide
  modified_base 18: mod_base = OTHER; note = 2'-O-methyl modified nucleotide
  modified_base 19: mod_base = OTHER; note = 2'-O-methyl modified nucleotide with thiophosphate linkage
  modified_base 20: mod_base = OTHER; note = 2'-O-methyl modified nucleotide with thiophosphate linkage
  modified_base 21: mod_base = OTHER; note = 2'-O-methyl modified nucleotide
tattgtgtcaggttgcagtag

SEQ ID NO: 368 - RNA, 21 nt, synthetic construct
  source 1..21: mol_type = other RNA
  modified_base 1: mod_base = OTHER; note = 2'-O-methyl modified nucleotide with thiophosphate linkage
  modified_base 2: mod_base = OTHER; note = 2'-fluoro modified nucleotide with thiophosphate linkage
  modified_base 3: mod_base = OTHER; note = 2'-O-methyl modified nucleotide
  modified_base 4: mod_base = OTHER; note = 2'-O-methyl modified nucleotide
  modified_base 5: mod_base = OTHER; note = 2'-O-methyl modified nucleotide
  modified_base 6: mod_base = OTHER; note = 2'-O-methyl modified nucleotide
  modified_base 7: mod_base = OTHER; note = 2'-fluoro modified nucleotide
  modified_base 8: mod_base = OTHER; note = 2'-O-methyl modified nucleotide
  modified_base 9: mod_base = OTHER; note = 2'-O-methyl modified nucleotide
  modified_base 10: mod_base = OTHER; note = 2'-O-methyl modified nucleotide
  modified_base 11: mod_base = OTHER; note = 2'-O-methyl modified nucleotide
  modified_base 12: mod_base = OTHER; note = 2'-fluoro modified nucleotide
  modified_base 13: mod_base = OTHER; note = 2'-O-methyl modified nucleotide
  modified_base 14: mod_base = OTHER; note = 2'-fluoro modified nucleotide
  modified_base 15: mod_base = OTHER; note = 2'-O-methyl modified nucleotide
  modified_base 16: mod_base = OTHER; note = 2'-fluoro modified nucleotide
  modified_base 17: mod_base = OTHER; note = 2'-O-methyl modified nucleotide
  modified_base 18: mod_base = OTHER; note = 2'-O-methyl modified nucleotide
  modified_base 19: mod_base = OTHER; note = 2'-O-methyl modified nucleotide with thiophosphate linkage
  modified_base 20: mod_base = OTHER; note = 2'-O-methyl modified nucleotide with thiophosphate linkage
  modified_base 21: mod_base = OTHER; note = 2'-O-methyl modified nucleotide
ttgcgtctgagcattgtgtcc

SEQ ID NO: 369 - RNA, 21 nt, synthetic construct
  source 1..21: mol_type = other RNA
  modified_base 1: mod_base = OTHER; note = 2'-O-methyl modified nucleotide with thiophosphate linkage
  modified_base 2: mod_base = OTHER; note = 2'-fluoro modified nucleotide with thiophosphate linkage
  modified_base 3: mod_base = OTHER; note = 2'-O-methyl modified nucleotide
  modified_base 4: mod_base = OTHER; note = 2'-O-methyl modified nucleotide
  modified_base 5: mod_base = OTHER; note = 2'-O-methyl modified nucleotide
  modified_base 6: mod_base = OTHER; note = 2'-O-methyl modified nucleotide
  modified_base 7: mod_base = OTHER; note = 2'-fluoro modified nucleotide
  modified_base 8: mod_base = OTHER; note = 2'-O-methyl modified nucleotide
  modified_base 9: mod_base = OTHER; note = 2'-O-methyl modified nucleotide
  modified_base 10: mod_base = OTHER; note = 2'-O-methyl modified nucleotide
  modified_base 11: mod_base = OTHER; note = 2'-O-methyl modified nucleotide
  modified_base 12: mod_base = OTHER; note = 2'-fluoro modified nucleotide
  modified_base 13: mod_base = OTHER; note = 2'-O-methyl modified nucleotide
  modified_base 14: mod_base = OTHER; note = 2'-fluoro modified nucleotide
  modified_base 15: mod_base = OTHER; note = 2'-O-methyl modified nucleotide
  modified_base 16: mod_base = OTHER; note = 2'-fluoro modified nucleotide
  modified_base 17: mod_base = OTHER; note = 2'-O-methyl modified nucleotide
  modified_base 18: mod_base = OTHER; note = 2'-O-methyl modified nucleotide
  modified_base 19: mod_base = OTHER; note = 2'-O-methyl modified nucleotide with thiophosphate linkage
  modified_base 20: mod_base = OTHER; note = 2'-O-methyl modified nucleotide with thiophosphate linkage
  modified_base 21: mod_base = OTHER; note = 2'-O-methyl modified nucleotide
ttgttcagaaggagcctctac

SEQ ID NO: 370 - RNA, 21 nt, synthetic construct
  source 1..21: mol_type = other RNA
  modified_base 1: mod_base = OTHER; note = 2'-O-methyl modified nucleotide with thiophosphate linkage
  modified_base 2: mod_base = OTHER; note = 2'-fluoro modified nucleotide with thiophosphate linkage
  modified_base 3: mod_base = OTHER; note = 2'-O-methyl modified nucleotide
  modified_base 4: mod_base = OTHER; note = 2'-O-methyl modified nucleotide
  modified_base 5: mod_base = OTHER; note = 2'-O-methyl modified nucleotide
  modified_base 6: mod_base = OTHER; note = 2'-O-methyl modified nucleotide
  modified_base 7: mod_base = OTHER; note = 2'-fluoro modified nucleotide
  modified_base 8: mod_base = OTHER; note = 2'-O-methyl modified nucleotide
  modified_base 9: mod_base = OTHER; note = 2'-O-methyl modified nucleotide
  modified_base 10: mod_base = OTHER; note = 2'-O-methyl modified nucleotide
  modified_base 11: mod_base = OTHER; note = 2'-O-methyl modified nucleotide
  modified_base 12: mod_base = OTHER; note = 2'-fluoro modified nucleotide
  modified_base 13: mod_base = OTHER; note = 2'-O-methyl modified nucleotide
  modified_base 14: mod_base = OTHER; note = 2'-fluoro modified nucleotide
  modified_base 15: mod_base = OTHER; note = 2'-O-methyl modified nucleotide
  modified_base 16: mod_base = OTHER; note = 2'-fluoro modified nucleotide
  modified_base 17: mod_base = OTHER; note = 2'-O-methyl modified nucleotide
  modified_base 18: mod_base = OTHER; note = 2'-O-methyl modified nucleotide
  modified_base 19: mod_base = OTHER; note = 2'-O-methyl modified nucleotide with thiophosphate linkage
  modified_base 20: mod_base = OTHER; note = 2'-O-methyl modified nucleotide with thiophosphate linkage
  modified_base 21: mod_base = OTHER; note = 2'-O-methyl modified nucleotide
tgcttgttcagaaggagcctg

SEQ ID NO: 371 - RNA, 21 nt, synthetic construct
  source 1..21: mol_type = other RNA
  modified_base 1: mod_base = OTHER; note = 2'-O-methyl modified nucleotide with thiophosphate linkage
  modified_base 2: mod_base = OTHER; note = 2'-fluoro modified nucleotide with thiophosphate linkage
  modified_base 3: mod_base = OTHER; note = 2'-O-methyl modified nucleotide
  modified_base 4: mod_base = OTHER; note = 2'-O-methyl modified nucleotide
  modified_base 5: mod_base = OTHER; note = 2'-O-methyl modified nucleotide
  modified_base 6: mod_base = OTHER; note = 2'-O-methyl modified nucleotide
  modified_base 7: mod_base = OTHER; note = 2'-fluoro modified nucleotide
  modified_base 8: mod_base = OTHER; note = 2'-O-methyl modified nucleotide
  modified_base 9: mod_base = OTHER; note = 2'-O-methyl modified nucleotide
  modified_base 10: mod_base = OTHER; note = 2'-O-methyl modified nucleotide
  modified_base 11: mod_base = OTHER; note = 2'-O-methyl modified nucleotide
  modified_base 12: mod_base = OTHER; note = 2'-fluoro modified nucleotide
  modified_base 13: mod_base = OTHER; note = 2'-O-methyl modified nucleotide
  modified_base 14: mod_base = OTHER; note = 2'-fluoro modified nucleotide
  modified_base 15: mod_base = OTHER; note = 2'-O-methyl modified nucleotide
  modified_base 16: mod_base = OTHER; note = 2'-fluoro modified nucleotide
  modified_base 17: mod_base = OTHER; note = 2'-O-methyl modified nucleotide
  modified_base 18: mod_base = OTHER; note = 2'-O-methyl modified nucleotide
  modified_base 19: mod_base = OTHER; note = 2'-O-methyl modified nucleotide with thiophosphate linkage
  modified_base 20: mod_base = OTHER; note = 2'-O-methyl modified nucleotide with thiophosphate linkage
  modified_base 21: mod_base = OTHER; note = 2'-O-methyl modified nucleotide
tctttgctcagttggtgcttc

SEQ ID NO: 372 - RNA, 21 nt, synthetic construct
  source 1..21: mol_type = other RNA
  modified_base 1: mod_base = OTHER; note = 2'-O-methyl modified nucleotide with thiophosphate linkage
  modified_base 2: mod_base = OTHER; note = 2'-fluoro modified nucleotide with thiophosphate linkage
  modified_base 3: mod_base = OTHER; note = 2'-O-methyl modified nucleotide
  modified_base 4: mod_base = OTHER; note = 2'-O-methyl modified nucleotide
  modified_base 5: mod_base = OTHER; note = 2'-O-methyl modified nucleotide
  modified_base 6: mod_base = OTHER; note = 2'-O-methyl modified nucleotide
  modified_base 7: mod_base = OTHER; note = 2'-fluoro modified nucleotide
  modified_base 8: mod_base = OTHER; note = 2'-O-methyl modified nucleotide
  modified_base 9: mod_base = OTHER; note = 2'-O-methyl modified nucleotide
  modified_base 10: mod_base = OTHER; note = 2'-O-methyl modified nucleotide
  modified_base 11: mod_base = OTHER; note = 2'-O-methyl modified nucleotide
  modified_base 12: mod_base = OTHER; note = 2'-fluoro modified nucleotide
  modified_base 13: mod_base = OTHER; note = 2'-O-methyl modified nucleotide
  modified_base 14: mod_base = OTHER; note = 2'-fluoro modified nucleotide
  modified_base 15: mod_base = OTHER; note = 2'-O-methyl modified nucleotide
  modified_base 16: mod_base = OTHER; note = 2'-fluoro modified nucleotide
  modified_base 17: mod_base = OTHER; note = 2'-O-methyl modified nucleotide
  modified_base 18: mod_base = OTHER; note = 2'-O-methyl modified nucleotide
  modified_base 19: mod_base = OTHER; note = 2'-O-methyl modified nucleotide with thiophosphate linkage
  modified_base 20: mod_base = OTHER; note = 2'-O-methyl modified nucleotide with thiophosphate linkage
  modified_base 21: mod_base = OTHER; note = 2'-O-methyl modified nucleotide
tgataactctgtccatttccc

SEQ ID NO: 373 - RNA, 21 nt, synthetic construct
  source 1..21: mol_type = other RNA
  modified_base 1: mod_base = OTHER; note = 2'-O-methyl modified nucleotide with thiophosphate linkage
  modified_base 2: mod_base = OTHER; note = 2'-fluoro modified nucleotide with thiophosphate linkage
  modified_base 3: mod_base = OTHER; note = 2'-O-methyl modified nucleotide
  modified_base 4: mod_base = OTHER; note = 2'-O-methyl modified nucleotide
  modified_base 5: mod_base = OTHER; note = 2'-O-methyl modified nucleotide
  modified_base 6: mod_base = OTHER; note = 2'-O-methyl modified nucleotide
  modified_base 7: mod_base = OTHER; note = 2'-fluoro modified nucleotide
  modified_base 8: mod_base = OTHER; note = 2'-O-methyl modified nucleotide
  modified_base 9: mod_base = OTHER; note = 2'-O-methyl modified nucleotide
  modified_base 10: mod_base = OTHER; note = 2'-O-methyl modified nucleotide
  modified_base 11: mod_base = OTHER; note = 2'-O-methyl modified nucleotide
  modified_base 12: mod_base = OTHER; note = 2'-fluoro modified nucleotide
  modified_base 13: mod_base = OTHER; note = 2'-O-methyl modified nucleotide
  modified_base 14: mod_base = OTHER; note = 2'-fluoro modified nucleotide
  modified_base 15: mod_base = OTHER; note = 2'-O-methyl modified nucleotide
  modified_base 16: mod_base = OTHER; note = 2'-fluoro modified nucleotide
  modified_base 17: mod_base = OTHER; note = 2'-O-methyl modified nucleotide
  modified_base 18: mod_base = OTHER; note = 2'-O-methyl modified nucleotide
  modified_base 19: mod_base = OTHER; note = 2'-O-methyl modified nucleotide with thiophosphate linkage
  modified_base 20: mod_base = OTHER; note = 2'-O-methyl modified nucleotide with thiophosphate linkage
  modified_base 21: mod_base = OTHER; note = 2'-O-methyl modified nucleotide
tttgataactctgtccatttg

SEQ ID NO: 374 - RNA, 21 nt, synthetic construct
  source 1..21: mol_type = other RNA
  modified_base 1: mod_base = OTHER; note = 2'-O-methyl modified nucleotide with thiophosphate linkage
  modified_base 2: mod_base = OTHER; note = 2'-fluoro modified nucleotide with thiophosphate linkage
  modified_base 3: mod_base = OTHER; note = 2'-O-methyl modified nucleotide
  modified_base 4: mod_base = OTHER; note = 2'-O-methyl modified nucleotide
  modified_base 5: mod_base = OTHER; note = 2'-O-methyl modified nucleotide
  modified_base 6: mod_base = OTHER; note = 2'-O-methyl modified nucleotide
  modified_base 7: mod_base = OTHER; note = 2'-fluoro modified nucleotide
  modified_base 8: mod_base = OTHER; note = 2'-O-methyl modified nucleotide
  modified_base 9: mod_base = OTHER; note = 2'-O-methyl modified nucleotide
  modified_base 10: mod_base = OTHER; note = 2'-O-methyl modified nucleotide
  modified_base 11: mod_base = OTHER; note = 2'-O-methyl modified nucleotide
  modified_base 12: mod_base = OTHER; note = 2'-fluoro modified nucleotide
  modified_base 13: mod_base = OTHER; note = 2'-O-methyl modified nucleotide
  modified_base 14: mod_base = OTHER; note = 2'-fluoro modified nucleotide
  modified_base 15: mod_base = OTHER; note = 2'-O-methyl modified nucleotide
  modified_base 16: mod_base = OTHER; note = 2'-fluoro modified nucleotide
  modified_base 17: mod_base = OTHER; note = 2'-O-methyl modified nucleotide
  modified_base 18: mod_base = OTHER; note = 2'-O-methyl modified nucleotide
  modified_base 19: mod_base = OTHER; note = 2'-O-methyl modified nucleotide with thiophosphate linkage
  modified_base 20: mod_base = OTHER; note = 2'-O-methyl modified nucleotide with thiophosphate linkage
  modified_base 21: mod_base = OTHER; note = 2'-O-methyl modified nucleotide
ttgccttgataactctgtccc

SEQ ID NO: 375 - RNA, 21 nt, synthetic construct
  source 1..21: mol_type = other RNA
  modified_base 1: mod_base = OTHER; note = 2'-O-methyl modified nucleotide with thiophosphate linkage
  modified_base 2: mod_base = OTHER; note = 2'-fluoro modified nucleotide with thiophosphate linkage
  modified_base 3: mod_base = OTHER; note = 2'-O-methyl modified nucleotide
  modified_base 4: mod_base = OTHER; note = 2'-O-methyl modified nucleotide
  modified_base 5: mod_base = OTHER; note = 2'-O-methyl modified nucleotide
  modified_base 6: mod_base = OTHER; note = 2'-O-methyl modified nucleotide
  modified_base 7: mod_base = OTHER; note = 2'-fluoro modified nucleotide
  modified_base 8: mod_base = OTHER; note = 2'-O-methyl modified nucleotide
  modified_base 9: mod_base = OTHER; note = 2'-O-methyl modified nucleotide
  modified_base 10: mod_base = OTHER; note = 2'-O-methyl modified nucleotide
  modified_base 11: mod_base = OTHER; note = 2'-O-methyl modified nucleotide
  modified_base 12: mod_base = OTHER; note = 2'-fluoro modified nucleotide
  modified_base 13: mod_base = OTHER; note = 2'-O-methyl modified nucleotide
  modified_base 14: mod_base = OTHER; note = 2'-fluoro modified nucleotide
  modified_base 15: mod_base = OTHER; note = 2'-O-methyl modified nucleotide
  modified_base 16: mod_base = OTHER; note = 2'-fluoro modified nucleotide
  modified_base 17: mod_base = OTHER; note = 2'-O-methyl modified nucleotide
  modified_base 18: mod_base = OTHER; note = 2'-O-methyl modified nucleotide
  modified_base 19: mod_base = OTHER; note = 2'-O-methyl modified nucleotide with thiophosphate linkage
  modified_base 20: mod_base = OTHER; note = 2'-O-methyl modified nucleotide with thiophosphate linkage
  modified_base 21: mod_base = OTHER; note = 2'-O-methyl modified nucleotide
ttttcggcagtagttcttgac

SEQ ID NO: 376 - RNA, 21 nt, synthetic construct
  source 1..21: mol_type = other RNA
  modified_base 1: mod_base = OTHER; note = 2'-O-methyl modified nucleotide with thiophosphate linkage
  modified_base 2: mod_base = OTHER; note = 2'-fluoro modified nucleotide with thiophosphate linkage
  modified_base 3: mod_base = OTHER; note = 2'-O-methyl modified nucleotide
  modified_base 4: mod_base = OTHER; note = 2'-O-methyl modified nucleotide
  modified_base 5: mod_base = OTHER; note = 2'-O-methyl modified nucleotide
  modified_base 6: mod_base = OTHER; note = 2'-O-methyl modified nucleotide
  modified_base 7: mod_base = OTHER; note = 2'-fluoro modified nucleotide
  modified_base 8: mod_base = OTHER; note = 2'-O-methyl modified nucleotide
  modified_base 9: mod_base = OTHER; note = 2'-O-methyl modified nucleotide
  modified_base 10: mod_base = OTHER; note = 2'-O-methyl modified nucleotide
  modified_base 11: mod_base = OTHER; note = 2'-O-methyl modified nucleotide
  modified_base 12: mod_base = OTHER; note = 2'-fluoro modified nucleotide
  modified_base 13: mod_base = OTHER; note = 2'-O-methyl modified nucleotide
  modified_base 14: mod_base = OTHER; note = 2'-fluoro modified nucleotide
  modified_base 15: mod_base = OTHER; note = 2'-O-methyl modified nucleotide
  modified_base 16: mod_base = OTHER; note = 2'-fluoro modified nucleotide
  modified_base 17: mod_base = OTHER; note = 2'-O-methyl modified nucleotide
  modified_base 18: mod_base = OTHER; note = 2'-O-methyl modified nucleotide
  modified_base 19: mod_base = OTHER; note = 2'-O-methyl modified nucleotide with thiophosphate linkage
  modified_base 20: mod_base = OTHER; note = 2'-O-methyl modified nucleotide with thiophosphate linkage
  modified_base 21: mod_base = OTHER; note = 2'-O-methyl modified nucleotide
tatttcggcagtagttcttgc

SEQ ID NO: 377 - RNA, 21 nt, synthetic construct
  source 1..21: mol_type = other RNA
  modified_base 1: mod_base = OTHER; note = 2'-O-methyl modified nucleotide with thiophosphate linkage
  modified_base 2: mod_base = OTHER; note = 2'-fluoro modified nucleotide with thiophosphate linkage
  modified_base 3: mod_base = OTHER; note = 2'-O-methyl modified nucleotide
  modified_base 4: mod_base = OTHER; note = 2'-O-methyl modified nucleotide
  modified_base 5: mod_base = OTHER; note = 2'-O-methyl modified nucleotide
  modified_base 6: mod_base = OTHER; note = 2'-O-methyl modified nucleotide
  modified_base 7: mod_base = OTHER; note = 2'-fluoro modified nucleotide
  modified_base 8: mod_base = OTHER; note = 2'-O-methyl modified nucleotide
  modified_base 9: mod_base = OTHER; note = 2'-O-methyl modified nucleotide
  modified_base 10: mod_base = OTHER; note = 2'-O-methyl modified nucleotide
  modified_base 11: mod_base = OTHER; note = 2'-O-methyl modified nucleotide
  modified_base 12: mod_base = OTHER; note = 2'-fluoro modified nucleotide
  modified_base 13: mod_base = OTHER; note = 2'-O-methyl modified nucleotide
  modified_base 14: mod_base = OTHER; note = 2'-fluoro modified nucleotide
  modified_base 15: mod_base = OTHER; note = 2'-O-methyl modified nucleotide
  modified_base 16: mod_base = OTHER; note = 2'-fluoro modified nucleotide
  modified_base 17: mod_base = OTHER; note = 2'-O-methyl modified nucleotide
  modified_base 18: mod_base = OTHER; note = 2'-O-methyl modified nucleotide
  modified_base 19: mod_base = OTHER; note = 2'-O-methyl modified nucleotide with thiophosphate linkage
  modified_base 20: mod_base = OTHER; note = 2'-O-methyl modified nucleotide with thiophosphate linkage
  modified_base 21: mod_base = OTHER; note = 2'-O-methyl modified nucleotide
tgatttcggcagtagttcttc

SEQ ID NO: 378 - RNA, 21 nt, synthetic construct
  source 1..21: mol_type = other RNA
  modified_base 1: mod_base = OTHER; note = 2'-O-methyl modified nucleotide with thiophosphate linkage
  modified_base 2: mod_base = OTHER; note = 2'-fluoro modified nucleotide with thiophosphate linkage
  modified_base 3: mod_base = OTHER; note = 2'-O-methyl modified nucleotide
  modified_base 4: mod_base = OTHER; note = 2'-O-methyl modified nucleotide
  modified_base 5: mod_base = OTHER; note = 2'-O-methyl modified nucleotide
  modified_base 6: mod_base = OTHER; note = 2'-O-methyl modified nucleotide
  modified_base 7: mod_base = OTHER; note = 2'-fluoro modified nucleotide
  modified_base 8: mod_base = OTHER; note = 2'-O-methyl modified nucleotide
  modified_base 9: mod_base = OTHER; note = 2'-O-methyl modified nucleotide
  modified_base 10: mod_base = OTHER; note = 2'-O-methyl modified nucleotide
  modified_base 11: mod_base = OTHER; note = 2'-O-methyl modified nucleotide
  modified_base 12: mod_base = OTHER; note = 2'-fluoro modified nucleotide
  modified_base 13: mod_base = OTHER; note = 2'-O-methyl modified nucleotide
  modified_base 14: mod_base = OTHER; note = 2'-fluoro modified nucleotide
  modified_base 15: mod_base = OTHER; note = 2'-O-methyl modified nucleotide
  modified_base 16: mod_base = OTHER; note = 2'-fluoro modified nucleotide
  modified_base 17: mod_base = OTHER; note = 2'-O-methyl modified nucleotide
  modified_base 18: mod_base = OTHER; note = 2'-O-methyl modified nucleotide
  modified_base 19: mod_base = OTHER; note = 2'-O-methyl modified nucleotide with thiophosphate linkage
  modified_base 20: mod_base = OTHER; note = 2'-O-methyl modified nucleotide with thiophosphate linkage
  modified_base 21: mod_base = OTHER; note = 2'-O-methyl modified nucleotide
tggatctggatttcggcagtc

SEQ ID NO: 379 - RNA, 21 nt, synthetic construct
  source 1..21: mol_type = other RNA
  modified_base 1: mod_base = OTHER; note = 2'-O-methyl modified nucleotide with thiophosphate linkage
  modified_base 2: mod_base = OTHER; note = 2'-fluoro modified nucleotide with thiophosphate linkage
  modified_base 3: mod_base = OTHER; note = 2'-O-methyl modified nucleotide
  modified_base 4: mod_base = OTHER; note = 2'-O-methyl modified nucleotide
  modified_base 5: mod_base = OTHER; note = 2'-O-methyl modified nucleotide
  modified_base 6: mod_base = OTHER; note = 2'-O-methyl modified nucleotide
  modified_base 7: mod_base = OTHER; note = 2'-fluoro modified nucleotide
  modified_base 8: mod_base = OTHER; note = 2'-O-methyl modified nucleotide
  modified_base 9: mod_base = OTHER; note = 2'-O-methyl modified nucleotide
  modified_base 10: mod_base = OTHER; note = 2'-O-methyl modified nucleotide
  modified_base 11: mod_base = OTHER; note = 2'-O-methyl modified nucleotide
  modified_base 12: mod_base = OTHER; note = 2'-fluoro modified nucleotide
  modified_base 13: mod_base = OTHER; note = 2'-O-methyl modified nucleotide
  modified_base 14: mod_base = OTHER; note = 2'-fluoro modified nucleotide
  modified_base 15: mod_base = OTHER; note = 2'-O-methyl modified nucleotide
  modified_base 16: mod_base = OTHER; note = 2'-fluoro modified nucleotide
  modified_base 17: mod_base = OTHER; note = 2'-O-methyl modified nucleotide
  modified_base 18: mod_base = OTHER; note = 2'-O-methyl modified nucleotide
  modified_base 19: mod_base = OTHER; note = 2'-O-methyl modified nucleotide with thiophosphate linkage
  modified_base 20: mod_base = OTHER; note = 2'-O-methyl modified nucleotide with thiophosphate linkage
  modified_base 21: mod_base = OTHER; note = 2'-O-methyl modified nucleotide
tatcgtgtcaggttgcagtag

SEQ ID NO: 380 - RNA, 21 nt, synthetic construct
  source 1..21: mol_type = other RNA
  modified_base 1: mod_base = OTHER; note = 2'-O-methyl modified nucleotide with thiophosphate linkage
  modified_base 2: mod_base = OTHER; note = 2'-fluoro modified nucleotide with thiophosphate linkage
  modified_base 3: mod_base = OTHER; note = 2'-O-methyl modified nucleotide
  modified_base 4: mod_base = OTHER; note = 2'-O-methyl modified nucleotide
  modified_base 5: mod_base = OTHER; note = 2'-O-methyl modified nucleotide
  modified_base 6: mod_base = OTHER; note = 2'-O-methyl modified nucleotide
  modified_base 7: mod_base = OTHER; note = 2'-fluoro modified nucleotide
  modified_base 8: mod_base = OTHER; note = 2'-O-methyl modified nucleotide
  modified_base 9: mod_base = OTHER; note = 2'-O-methyl modified nucleotide
  modified_base 10: mod_base = OTHER; note = 2'-O-methyl modified nucleotide
  modified_base 11: mod_base = OTHER; note = 2'-O-methyl modified nucleotide
  modified_base 12: mod_base = OTHER; note = 2'-fluoro modified nucleotide
  modified_base 13: mod_base = OTHER; note = 2'-O-methyl modified nucleotide
  modified_base 14: mod_base = OTHER; note = 2'-fluoro modified nucleotide
  modified_base 15: mod_base = OTHER; note = 2'-O-methyl modified nucleotide
  modified_base 16: mod_base = OTHER; note = 2'-fluoro modified nucleotide
  modified_base 17: mod_base = OTHER; note = 2'-O-methyl modified nucleotide
  modified_base 18: mod_base = OTHER; note = 2'-O-methyl modified nucleotide
  modified_base 19: mod_base = OTHER; note = 2'-O-methyl modified nucleotide with thiophosphate linkage
  modified_base 20: mod_base = OTHER; note = 2'-O-methyl modified nucleotide with thiophosphate linkage
  modified_base 21: mod_base = OTHER; note = 2'-O-methyl modified nucleotide
ttgcatctgagcatcgtgtcc

SEQ ID NO: 381 - RNA, 21 nt, synthetic construct
  source 1..21: mol_type = other RNA
  modified_base 1: mod_base = OTHER; note = 2'-O-methyl modified nucleotide with thiophosphate linkage
  modified_base 2: mod_base = OTHER; note = 2'-fluoro modified nucleotide with thiophosphate linkage
  modified_base 3: mod_base = OTHER; note = 2'-O-methyl modified nucleotide
  modified_base 4: mod_base = OTHER; note = 2'-O-methyl modified nucleotide
  modified_base 5: mod_base = OTHER; note = 2'-O-methyl modified nucleotide
  modified_base 6: mod_base = OTHER; note = 2'-O-methyl modified nucleotide
  modified_base 7: mod_base = OTHER; note = 2'-fluoro modified nucleotide
  modified_base 8: mod_base = OTHER; note = 2'-O-methyl modified nucleotide
  modified_base 9: mod_base = OTHER; note = 2'-O-methyl modified nucleotide
  modified_base 10: mod_base = OTHER; note = 2'-O-methyl modified nucleotide
  modified_base 11: mod_base = OTHER; note = 2'-O-methyl modified nucleotide
  modified_base 12: mod_base = OTHER; note = 2'-fluoro modified nucleotide
  modified_base 13: mod_base = OTHER; note = 2'-O-methyl modified nucleotide
  modified_base 14: mod_base = OTHER; note = 2'-fluoro modified nucleotide
  modified_base 15: mod_base = OTHER; note = 2'-O-methyl modified nucleotide
  modified_base 16: mod_base = OTHER; note = 2'-fluoro modified nucleotide
  modified_base 17: mod_base = OTHER; note = 2'-O-methyl modified nucleotide
  modified_base 18: mod_base = OTHER; note = 2'-O-methyl modified nucleotide
  modified_base 19: mod_base = OTHER; note = 2'-O-methyl modified nucleotide with thiophosphate linkage
  modified_base 20: mod_base = OTHER; note = 2'-O-methyl modified nucleotide with thiophosphate linkage
  modified_base 21: mod_base = OTHER; note = 2'-O-methyl modified nucleotide
tcataatggtagtagcagtcg

SEQ ID NO: 382 - RNA, 21 nt, synthetic construct
  source 1..21: mol_type = other RNA
  modified_base 1: mod_base = OTHER; note = 2'-O-methyl modified nucleotide with thiophosphate linkage
  modified_base 2: mod_base = OTHER; note = 2'-fluoro modified nucleotide with thiophosphate linkage
  modified_base 3: mod_base = OTHER; note = 2'-O-methyl modified nucleotide
  modified_base 4: mod_base = OTHER; note = 2'-O-methyl modified nucleotide
  modified_base 5: mod_base = OTHER; note = 2'-O-methyl modified nucleotide
  modified_base 6: mod_base = OTHER; note = 2'-O-methyl modified nucleotide
  modified_base 7: mod_base = OTHER; note = 2'-fluoro modified nucleotide
  modified_base 8: mod_base = OTHER; note = 2'-O-methyl modified nucleotide
  modified_base 9: mod_base = OTHER; note = 2'-O-methyl modified nucleotide
  modified_base 10: mod_base = OTHER; note = 2'-O-methyl modified nucleotide
  modified_base 11: mod_base = OTHER; note = 2'-O-methyl modified nucleotide
  modified_base 12: mod_base = OTHER; note = 2'-fluoro modified nucleotide
  modified_base 13: mod_base = OTHER; note = 2'-O-methyl modified nucleotide
  modified_base 14: mod_base = OTHER; note = 2'-fluoro modified nucleotide
  modified_base 15: mod_base = OTHER; note = 2'-O-methyl modified nucleotide
  modified_base 16: mod_base = OTHER; note = 2'-fluoro modified nucleotide
  modified_base 17: mod_base = OTHER; note = 2'-O-methyl modified nucleotide
  modified_base 18: mod_base = OTHER; note = 2'-O-methyl modified nucleotide
  modified_base 19: mod_base = OTHER; note = 2'-O-methyl modified nucleotide with thiophosphate linkage
  modified_base 20: mod_base = OTHER; note = 2'-O-methyl modified nucleotide with thiophosphate linkage
  modified_base 21: mod_base = OTHER; note = 2'-O-methyl modified nucleotide
tccataatggtagtagcagtg

SEQ ID NO: 383 - RNA, 21 nt, synthetic construct
  source 1..21: mol_type = other RNA
  modified_base 1: mod_base = OTHER; note = 2'-O-methyl modified nucleotide with thiophosphate linkage
  modified_base 2: mod_base = OTHER; note = 2'-fluoro modified nucleotide with thiophosphate linkage
  modified_base 3: mod_base = OTHER; note = 2'-O-methyl modified nucleotide
  modified_base 4: mod_base = OTHER; note = 2'-O-methyl modified nucleotide
  modified_base 5: mod_base = OTHER; note = 2'-O-methyl modified nucleotide
  modified_base 6: mod_base = OTHER; note = 2'-O-methyl modified nucleotide
  modified_base 7: mod_base = OTHER; note = 2'-fluoro modified nucleotide
  modified_base 8: mod_base = OTHER; note = 2'-O-methyl modified nucleotide
  modified_base 9: mod_base = OTHER; note = 2'-O-methyl modified nucleotide
  modified_base 10: mod_base = OTHER; note = 2'-O-methyl modified nucleotide
  modified_base 11: mod_base = OTHER; note = 2'-O-methyl modified nucleotide
  modified_base 12: mod_base = OTHER; note = 2'-fluoro modified nucleotide
  modified_base 13: mod_base = OTHER; note = 2'-O-methyl modified nucleotide
  modified_base 14: mod_base = OTHER; note = 2'-fluoro modified nucleotide
  modified_base 15: mod_base = OTHER; note = 2'-O-methyl modified nucleotide
  modified_base 16: mod_base = OTHER; note = 2'-fluoro modified nucleotide
  modified_base 17: mod_base = OTHER; note = 2'-O-methyl modified nucleotide
  modified_base 18: mod_base = OTHER; note = 2'-O-methyl modified nucleotide
  modified_base 19: mod_base = OTHER; note = 2'-O-methyl modified nucleotide with thiophosphate linkage
  modified_base 20: mod_base = OTHER; note = 2'-O-methyl modified nucleotide with thiophosphate linkage
  modified_base 21: mod_base = OTHER; note = 2'-O-methyl modified nucleotide
ttccataatggtagtagcagc

SEQ ID NO: 384 - RNA, 21 nt, synthetic construct
  source 1..21: mol_type = other RNA
  modified_base 1: mod_base = OTHER; note = 2'-O-methyl modified nucleotide with thiophosphate linkage
  modified_base 2: mod_base = OTHER; note = 2'-fluoro modified nucleotide with thiophosphate linkage
  modified_base 3: mod_base = OTHER; note = 2'-O-methyl modified nucleotide
  modified_base 4: mod_base = OTHER; note = 2'-O-methyl modified nucleotide
  modified_base 5: mod_base = OTHER; note = 2'-O-methyl modified nucleotide
  modified_base 6: mod_base = OTHER; note = 2'-O-methyl modified nucleotide
  modified_base 7: mod_base = OTHER; note = 2'-fluoro modified nucleotide
  modified_base 8: mod_base = OTHER; note = 2'-O-methyl modified nucleotide
  modified_base 9: mod_base = OTHER; note = 2'-O-methyl modified nucleotide
  modified_base 10: mod_base = OTHER; note = 2'-O-methyl modified nucleotide
  modified_base 11: mod_base = OTHER; note = 2'-O-methyl modified nucleotide
  modified_base 12: mod_base = OTHER; note = 2'-fluoro modified nucleotide
  modified_base 13: mod_base = OTHER; note = 2'-O-methyl modified nucleotide
  modified_base 14: mod_base = OTHER; note = 2'-fluoro modified nucleotide
  modified_base 15: mod_base = OTHER; note = 2'-O-methyl modified nucleotide
  modified_base 16: mod_base = OTHER; note = 2'-fluoro modified nucleotide
  modified_base 17: mod_base = OTHER; note = 2'-O-methyl modified nucleotide
  modified_base 18: mod_base = OTHER; note = 2'-O-methyl modified nucleotide
  modified_base 19: mod_base = OTHER; note = 2'-O-methyl modified nucleotide with thiophosphate linkage
  modified_base 20: mod_base = OTHER; note = 2'-O-methyl modified nucleotide with thiophosphate linkage
  modified_base 21: mod_base = OTHER; note = 2'-O-methyl modified nucleotide
tctctgtccataatggtagtc

SEQ ID NO: 385 - RNA, 21 nt, synthetic construct
  source 1..21: mol_type = other RNA
  modified_base 1: mod_base = OTHER; note = 2'-O-methyl modified nucleotide with thiophosphate linkage
  modified_base 2: mod_base = OTHER; note = 2'-fluoro modified nucleotide with thiophosphate linkage
  modified_base 3: mod_base = OTHER; note = 2'-O-methyl modified nucleotide
  modified_base 4: mod_base = OTHER; note = 2'-O-methyl modified nucleotide
  modified_base 5: mod_base = OTHER; note = 2'-O-methyl modified nucleotide
  modified_base 6: mod_base = OTHER; note = 2'-O-methyl modified nucleotide
  modified_base 7: mod_base = OTHER; note = 2'-fluoro modified nucleotide
  modified_base 8: mod_base = OTHER; note = 2'-O-methyl modified nucleotide
  modified_base 9: mod_base = OTHER; note = 2'-O-methyl modified nucleotide
  modified_base 10: mod_base = OTHER; note = 2'-O-methyl modified nucleotide
  modified_base 11: mod_base = OTHER; note = 2'-O-methyl modified nucleotide
  modified_base 12: mod_base = OTHER; note = 2'-fluoro modified nucleotide
  modified_base 13: mod_base = OTHER; note = 2'-O-methyl modified nucleotide
  modified_base 14: mod_base = OTHER; note = 2'-fluoro modified nucleotide
  modified_base 15: mod_base = OTHER; note = 2'-O-methyl modified nucleotide
  modified_base 16: mod_base = OTHER; note = 2'-fluoro modified nucleotide
  modified_base 17: mod_base = OTHER; note = 2'-O-methyl modified nucleotide
  modified_base 18: mod_base = OTHER; note = 2'-O-methyl modified nucleotide
  modified_base 19: mod_base = OTHER; note = 2'-O-methyl modified nucleotide with thiophosphate linkage
  modified_base 20: mod_base = OTHER; note = 2'-O-methyl modified nucleotide with thiophosphate linkage
  modified_base 21: mod_base = OTHER; note = 2'-O-methyl modified nucleotide
tgatgaccaagcttggcaagc

SEQ ID NO: 386 - RNA, 21 nt, synthetic construct
  source 1..21: mol_type = other RNA
  modified_base 1: mod_base = OTHER; note = 2'-O-methyl modified nucleotide with thiophosphate linkage
  modified_base 2: mod_base = OTHER; note = 2'-fluoro modified nucleotide with thiophosphate linkage
  modified_base 3: mod_base = OTHER; note = 2'-O-methyl modified nucleotide
  modified_base 4: mod_base = OTHER; note = 2'-O-methyl modified nucleotide
  modified_base 5: mod_base = OTHER; note = 2'-O-methyl modified nucleotide
  modified_base 6: mod_base = OTHER; note = 2'-O-methyl modified nucleotide
  modified_base 7: mod_base = OTHER; note = 2'-fluoro modified nucleotide
  modified_base 8: mod_base = OTHER; note = 2'-O-methyl modified nucleotide
  modified_base 9: mod_base = OTHER; note = 2'-O-methyl modified nucleotide
  modified_base 10: mod_base = OTHER; note = 2'-O-methyl modified nucleotide
  modified_base 11: mod_base = OTHER; note = 2'-O-methyl modified nucleotide
  modified_base 12: mod_base = OTHER; note = 2'-fluoro modified nucleotide
  modified_base 13: mod_base = OTHER; note = 2'-O-methyl modified nucleotide
  modified_base 14: mod_base = OTHER; note = 2'-fluoro modified nucleotide
  modified_base 15: mod_base = OTHER; note = 2'-O-methyl modified nucleotide
  modified_base 16: mod_base = OTHER; note = 2'-fluoro modified nucleotide
  modified_base 17: mod_base = OTHER; note = 2'-O-methyl modified nucleotide
  modified_base 18: mod_base = OTHER; note = 2'-O-methyl modified nucleotide
  modified_base 19: mod_base = OTHER; note = 2'-O-methyl modified nucleotide with thiophosphate linkage
  modified_base 20: mod_base = OTHER; note = 2'-O-methyl modified nucleotide with thiophosphate linkage
  modified_base 21: mod_base = OTHER; note = 2'-O-methyl modified nucleotide
tagatgaccaagcttggcaac

SEQ ID NO: 387 - RNA, 21 nt, synthetic construct
  source 1..21: mol_type = other RNA
  modified_base 1: mod_base = OTHER; note = 2'-O-methyl modified nucleotide with thiophosphate linkage
  modified_base 2: mod_base = OTHER; note = 2'-fluoro modified nucleotide with thiophosphate linkage
  modified_base 3: mod_base = OTHER; note = 2'-O-methyl modified nucleotide
  modified_base 4: mod_base = OTHER; note = 2'-O-methyl modified nucleotide
  modified_base 5: mod_base = OTHER; note = 2'-O-methyl modified nucleotide
  modified_base 6: mod_base = OTHER; note = 2'-O-methyl modified nucleotide
  modified_base 7: mod_base = OTHER; note = 2'-fluoro modified nucleotide
  modified_base 8: mod_base = OTHER; note = 2'-O-methyl modified nucleotide
  modified_base 9: mod_base = OTHER; note = 2'-O-methyl modified nucleotide
  modified_base 10: mod_base = OTHER; note = 2'-O-methyl modified nucleotide
  modified_base 11: mod_base = OTHER; note = 2'-O-methyl modified nucleotide
  modified_base 12: mod_base = OTHER; note = 2'-fluoro modified nucleotide
  modified_base 13: mod_base = OTHER; note = 2'-O-methyl modified nucleotide
  modified_base 14: mod_base = OTHER; note = 2'-fluoro modified nucleotide
  modified_base 15: mod_base = OTHER; note = 2'-O-methyl modified nucleotide
  modified_base 16: mod_base = OTHER; note = 2'-fluoro modified nucleotide
  modified_base 17: mod_base = OTHER; note = 2'-O-methyl modified nucleotide
  modified_base 18: mod_base = OTHER; note = 2'-O-methyl modified nucleotide
  modified_base 19: mod_base = OTHER; note = 2'-O-methyl modified nucleotide with thiophosphate linkage
  modified_base 20: mod_base = OTHER; note = 2'-O-methyl modified nucleotide with thiophosphate linkage
  modified_base 21: mod_base = OTHER; note = 2'-O-methyl modified nucleotide
tttttctggggtccgactatc

SEQ ID NO: 388 - RNA, 21 nt, synthetic construct
  source 1..21: mol_type = other RNA
  modified_base 1: mod_base = OTHER; note = 2'-O-methyl modified nucleotide with thiophosphate linkage
  modified_base 2: mod_base = OTHER; note = 2'-fluoro modified nucleotide with thiophosphate linkage
  modified_base 3: mod_base = OTHER; note = 2'-O-methyl modified nucleotide
  modified_base 4: mod_base = OTHER; note = 2'-O-methyl modified nucleotide
  modified_base 5: mod_base = OTHER; note = 2'-O-methyl modified nucleotide
  modified_base 6: mod_base = OTHER; note = 2'-O-methyl modified nucleotide
  modified_base 7: mod_base = OTHER; note = 2'-fluoro modified nucleotide
  modified_base 8: mod_base = OTHER; note = 2'-O-methyl modified nucleotide
  modified_base 9: mod_base = OTHER; note = 2'-O-methyl modified nucleotide
  modified_base 10: mod_base = OTHER; note = 2'-O-methyl modified nucleotide
  modified_base 11: mod_base = OTHER; note = 2'-O-methyl modified nucleotide
  modified_base 12: mod_base = OTHER; note = 2'-fluoro modified nucleotide
  modified_base 13: mod_base = OTHER; note = 2'-O-methyl modified nucleotide
  modified_base 14: mod_base = OTHER; note = 2'-fluoro modified nucleotide
  modified_base 15: mod_base = OTHER; note = 2'-O-methyl modified nucleotide
  modified_base 16: mod_base = OTHER; note = 2'-fluoro modified nucleotide
  modified_base 17: mod_base = OTHER; note = 2'-O-methyl modified nucleotide
  modified_base 18: mod_base = OTHER; note = 2'-O-methyl modified nucleotide
  modified_base 19: mod_base = OTHER; note = 2'-O-methyl modified nucleotide with thiophosphate linkage
  modified_base 20: mod_base = OTHER; note = 2'-O-methyl modified nucleotide with thiophosphate linkage
  modified_base 21: mod_base = OTHER; note = 2'-O-methyl modified nucleotide
tattcctgcagtagttcctgc

SEQ ID NO: 389 - RNA, 21 nt, synthetic construct
  source 1..21: mol_type = other RNA
  modified_base 1: mod_base = OTHER; note = 2'-O-methyl modified nucleotide with thiophosphate linkage
  modified_base 2: mod_base = OTHER; note = 2'-fluoro modified nucleotide with thiophosphate linkage
  modified_base 3: mod_base = OTHER; note = 2'-O-methyl modified nucleotide
  modified_base 4: mod_base = OTHER; note = 2'-O-methyl modified nucleotide
  modified_base 5: mod_base = OTHER; note = 2'-O-methyl modified nucleotide
  modified_base 6: mod_base = OTHER; note = 2'-O-methyl modified nucleotide
  modified_base 7: mod_base = OTHER; note = 2'-fluoro modified nucleotide
  modified_base 8: mod_base = OTHER; note = 2'-O-methyl modified nucleotide
  modified_base 9: mod_base = OTHER; note = 2'-O-methyl modified nucleotide
  modified_base 10: mod_base = OTHER; note = 2'-O-methyl modified nucleotide
  modified_base 11: mod_base = OTHER; note = 2'-O-methyl modified nucleotide
  modified_base 12: mod_base = OTHER; note = 2'-fluoro modified nucleotide
  modified_base 13: mod_base = OTHER; note = 2'-O-methyl modified nucleotide
  modified_base 14: mod_base = OTHER; note = 2'-fluoro modified nucleotide
  modified_base 15: mod_base = OTHER; note = 2'-O-methyl modified nucleotide
  modified_base 16: mod_base = OTHER; note = 2'-fluoro modified nucleotide
  modified_base 17: mod_base = OTHER; note = 2'-O-methyl modified nucleotide
  modified_base 18: mod_base = OTHER; note = 2'-O-methyl modified nucleotide
  modified_base 19: mod_base = OTHER; note = 2'-O-methyl modified nucleotide with thiophosphate linkage
  modified_base 20: mod_base = OTHER; note = 2'-O-methyl modified nucleotide with thiophosphate linkage
  modified_base 21: mod_base = OTHER; note = 2'-O-methyl modified nucleotide
tgaatctcagcatctggattg

SEQ ID NO: 390 - RNA, 21 nt, synthetic construct
  source 1..21: mol_type = other RNA
  modified_base 1: mod_base = OTHER; note = 2'-O-methyl modified nucleotide with thiophosphate linkage
  modified_base 2: mod_base = OTHER; note = 2'-fluoro modified nucleotide with thiophosphate linkage
  modified_base 3: mod_base = OTHER; note = 2'-O-methyl modified nucleotide
  modified_base 4: mod_base = OTHER; note = 2'-O-methyl modified nucleotide
  modified_base 5: mod_base = OTHER; note = 2'-O-methyl modified nucleotide
  modified_base 6: mod_base = OTHER; note = 2'-O-methyl modified nucleotide
  modified_base 7: mod_base = OTHER; note = 2'-fluoro modified nucleotide
  modified_base 8: mod_base = OTHER; note = 2'-O-methyl modified nucleotide
  modified_base 9: mod_base = OTHER; note = 2'-O-methyl modified nucleotide
  modified_base 10: mod_base = OTHER; note = 2'-O-methyl modified nucleotide
  modified_base 11: mod_base = OTHER; note = 2'-O-methyl modified nucleotide
  modified_base 12: mod_base = OTHER; note = 2'-fluoro modified nucleotide
  modified_base 13: mod_base = OTHER; note = 2'-O-methyl modified nucleotide
  modified_base 14: mod_base = OTHER; note = 2'-fluoro modified nucleotide
  modified_base 15: mod_base = OTHER; note = 2'-O-methyl modified nucleotide
  modified_base 16: mod_base = OTHER; note = 2'-fluoro modified nucleotide
  modified_base 17: mod_base = OTHER; note = 2'-O-methyl modified nucleotide
  modified_base 18: mod_base = OTHER; note = 2'-O-methyl modified nucleotide
  modified_base 19: mod_base = OTHER; note = 2'-O-methyl modified nucleotide with thiophosphate linkage
  modified_base 20: mod_base = OTHER; note = 2'-O-methyl modified nucleotide with thiophosphate linkage
  modified_base 21: mod_base = OTHER; note = 2'-O-methyl modified nucleotide
ttaacaccaagggcgaatctg

SEQ ID NO: 391 - RNA, 21 nt, synthetic construct
  source 1..21: mol_type = other RNA
  modified_base 1: mod_base = OTHER; note = 2'-O-methyl modified nucleotide with thiophosphate linkage
  modified_base 2: mod_base = OTHER; note = 2'-fluoro modified nucleotide with thiophosphate linkage
  modified_base 3: mod_base = OTHER; note = 2'-O-methyl modified nucleotide
  modified_base 4: mod_base = OTHER; note = 2'-O-methyl modified nucleotide
  modified_base 5: mod_base = OTHER; note = 2'-O-methyl modified nucleotide
  modified_base 6: mod_base = OTHER; note = 2'-O-methyl modified nucleotide
  modified_base 7: mod_base = OTHER; note = 2'-fluoro modified nucleotide
  modified_base 8: mod_base = OTHER; note = 2'-O-methyl modified nucleotide
  modified_base 9: mod_base = OTHER; note = 2'-O-methyl modified nucleotide
  modified_base 10: mod_base = OTHER; note = 2'-O-methyl modified nucleotide
  modified_base 11: mod_base = OTHER; note = 2'-O-methyl modified nucleotide
  modified_base 12: mod_base = OTHER; note = 2'-fluoro modified nucleotide
  modified_base 13: mod_base = OTHER; note = 2'-O-methyl modified nucleotide
  modified_base 14: mod_base = OTHER; note = 2'-fluoro modified nucleotide
  modified_base 15: mod_base = OTHER; note = 2'-O-methyl modified nucleotide
  modified_base 16: mod_base = OTHER; note = 2'-fluoro modified nucleotide
  modified_base 17: mod_base = OTHER; note = 2'-O-methyl modified nucleotide
  modified_base 18: mod_base = OTHER; note = 2'-O-methyl modified nucleotide
  modified_base 19: mod_base = OTHER; note = 2'-O-methyl modified nucleotide with thiophosphate linkage
  modified_base 20: mod_base = OTHER; note = 2'-O-methyl modified nucleotide with thiophosphate linkage
  modified_base 21: mod_base = OTHER; note = 2'-O-methyl modified nucleotide
tcatggtgtaacaccaagggg

SEQ ID NO: 392 - RNA, 21 nt, synthetic construct
  source 1..21: mol_type = other RNA
  modified_base 1: mod_base = OTHER; note = 2'-O-methyl modified nucleotide with thiophosphate linkage
  modified_base 2: mod_base = OTHER; note = 2'-fluoro modified nucleotide with thiophosphate linkage
  modified_base 3: mod_base = OTHER; note = 2'-O-methyl modified nucleotide
  modified_base 4: mod_base = OTHER; note = 2'-O-methyl modified nucleotide
  modified_base 5: mod_base = OTHER; note = 2'-O-methyl modified nucleotide
  modified_base 6: mod_base = OTHER; note = 2'-O-methyl modified nucleotide
  modified_base 7: mod_base = OTHER; note = 2'-fluoro modified nucleotide
  modified_base 8: mod_base = OTHER; note = 2'-O-methyl modified nucleotide
  modified_base 9: mod_base = OTHER; note = 2'-O-methyl modified nucleotide
  modified_base 10: mod_base = OTHER; note = 2'-O-methyl modified nucleotide
  modified_base 11: mod_base = OTHER; note = 2'-O-methyl modified nucleotide
  modified_base 12: mod_base = OTHER; note = 2'-fluoro modified nucleotide
  modified_base 13: mod_base = OTHER; note = 2'-O-methyl modified nucleotide
  modified_base 14: mod_base = OTHER; note = 2'-fluoro modified nucleotide
  modified_base 15: mod_base = OTHER; note = 2'-O-methyl modified nucleotide
  modified_base 16: mod_base = OTHER; note = 2'-fluoro modified nucleotide
  modified_base 17: mod_base = OTHER; note = 2'-O-methyl modified nucleotide
  modified_base 18: mod_base = OTHER; note = 2'-O-methyl modified nucleotide
  modified_base 19: mod_base = OTHER; note = 2'-O-methyl modified nucleotide with thiophosphate linkage
  modified_base 20: mod_base = OTHER; note = 2'-O-methyl modified nucleotide with thiophosphate linkage
  modified_base 21: mod_base = OTHER; note = 2'-O-methyl modified nucleotide
tacacttgattctgtcaccac

SEQ ID NO: 393 - RNA, 21 nt, synthetic construct
  source 1..21: mol_type = other RNA
  modified_base 1: mod_base = OTHER; note = 2'-O-methyl modified nucleotide with thiophosphate linkage
  modified_base 2: mod_base = OTHER; note = 2'-fluoro modified nucleotide with thiophosphate linkage
  modified_base 3: mod_base = OTHER; note = 2'-O-methyl modified nucleotide
  modified_base 4: mod_base = OTHER; note = 2'-O-methyl modified nucleotide
  modified_base 5: mod_base = OTHER; note = 2'-O-methyl modified nucleotide
  modified_base 6: mod_base = OTHER; note = 2'-O-methyl modified nucleotide
  modified_base 7: mod_base = OTHER; note = 2'-fluoro modified nucleotide
  modified_base 8: mod_base = OTHER; note = 2'-O-methyl modified nucleotide
  modified_base 9: mod_base = OTHER; note = 2'-O-methyl modified nucleotide
  modified_base 10: mod_base = OTHER; note = 2'-O-methyl modified nucleotide
  modified_base 11: mod_base = OTHER; note = 2'-O-methyl modified nucleotide
  modified_base 12: mod_base = OTHER; note = 2'-fluoro modified nucleotide
  modified_base 13: mod_base = OTHER; note = 2'-O-methyl modified nucleotide
  modified_base 14: mod_base = OTHER; note = 2'-fluoro modified nucleotide
  modified_base 15: mod_base = OTHER; note = 2'-O-methyl modified nucleotide
  modified_base 16: mod_base = OTHER; note = 2'-fluoro modified nucleotide
  modified_base 17: mod_base = OTHER; note = 2'-O-methyl modified nucleotide
  modified_base 18: mod_base = OTHER; note = 2'-O-methyl modified nucleotide
  modified_base 19: mod_base = OTHER; note = 2'-O-methyl modified nucleotide with thiophosphate linkage
  modified_base 20: mod_base = OTHER; note = 2'-O-methyl modified nucleotide with thiophosphate linkage
  modified_base 21: mod_base = OTHER; note = 2'-O-methyl modified nucleotide
tagttgcaaggacacttgatc

SEQ ID NO: 394 - RNA, 21 nt, synthetic construct
  source 1..21: mol_type = other RNA
  modified_base 1: mod_base = OTHER; note = 2'-O-methyl modified nucleotide with thiophosphate linkage
  modified_base 2: mod_base = OTHER; note = 2'-fluoro modified nucleotide with thiophosphate linkage
  modified_base 3: mod_base = OTHER; note = 2'-O-methyl modified nucleotide
  modified_base 4: mod_base = OTHER; note = 2'-O-methyl modified nucleotide
  modified_base 5: mod_base = OTHER; note = 2'-O-methyl modified nucleotide
  modified_base 6: mod_base = OTHER; note = 2'-O-methyl modified nucleotide
  modified_base 7: mod_base = OTHER; note = 2'-fluoro modified nucleotide
  modified_base 8: mod_base = OTHER; note = 2'-O-methyl modified nucleotide
  modified_base 9: mod_base = OTHER; note = 2'-O-methyl modified nucleotide
  modified_base 10: mod_base = OTHER; note = 2'-O-methyl modified nucleotide
  modified_base 11: mod_base = OTHER; note = 2'-O-methyl modified nucleotide
  modified_base 12: mod_base = OTHER; note = 2'-fluoro modified nucleotide
  modified_base 13: mod_base = OTHER; note = 2'-O-methyl modified nucleotide
  modified_base 14: mod_base = OTHER; note = 2'-fluoro modified nucleotide
  modified_base 15: mod_base = OTHER; note = 2'-O-methyl modified nucleotide
  modified_base 16: mod_base = OTHER; note = 2'-fluoro modified nucleotide
  modified_base 17: mod_base = OTHER; note = 2'-O-methyl modified nucleotide
  modified_base 18: mod_base = OTHER; note = 2'-O-methyl modified nucleotide
  modified_base 19: mod_base = OTHER; note = 2'-O-methyl modified nucleotide with thiophosphate linkage
  modified_base 20: mod_base = OTHER; note = 2'-O-methyl modified nucleotide with thiophosphate linkage
  modified_base 21: mod_base = OTHER; note = 2'-O-methyl modified nucleotide
ttggtagcaatcctggacccg

SEQ ID NO: 395 - RNA, 21 nt, synthetic construct
  source 1..21: mol_type = other RNA
  modified_base 1: mod_base = OTHER; note = 2'-O-methyl modified nucleotide with thiophosphate linkage
  modified_base 2: mod_base = OTHER; note = 2'-fluoro modified nucleotide with thiophosphate linkage
  modified_base 3: mod_base = OTHER; note = 2'-O-methyl modified nucleotide
  modified_base 4: mod_base = OTHER; note = 2'-O-methyl modified nucleotide
  modified_base 5: mod_base = OTHER; note = 2'-O-methyl modified nucleotide
  modified_base 6: mod_base = OTHER; note = 2'-O-methyl modified nucleotide
  modified_base 7: mod_base = OTHER; note = 2'-fluoro modified nucleotide
  modified_base 8: mod_base = OTHER; note = 2'-O-methyl modified nucleotide
  modified_base 9: mod_base = OTHER; note = 2'-O-methyl modified nucleotide
  modified_base 10: mod_base = OTHER; note = 2'-O-methyl modified nucleotide
  modified_base 11: mod_base = OTHER; note = 2'-O-methyl modified nucleotide
  modified_base 12: mod_base = OTHER; note = 2'-fluoro modified nucleotide
  modified_base 13: mod_base = OTHER; note = 2'-O-methyl modified nucleotide
  modified_base 14: mod_base = OTHER; note = 2'-fluoro modified nucleotide
  modified_base 15: mod_base = OTHER; note = 2'-O-methyl modified nucleotide
  modified_base 16: mod_base = OTHER; note = 2'-fluoro modified nucleotide
  modified_base 17: mod_base = OTHER; note = 2'-O-methyl modified nucleotide
  modified_base 18: mod_base = OTHER; note = 2'-O-methyl modified nucleotide
  modified_base 19: mod_base = OTHER; note = 2'-O-methyl modified nucleotide with thiophosphate linkage
  modified_base 20: mod_base = OTHER; note = 2'-O-methyl modified nucleotide with thiophosphate linkage
  modified_base 21: mod_base = OTHER; note = 2'-O-methyl modified nucleotide
tacatgtccttcctgtgacac

SEQ ID NO: 396 - RNA, 21 nt, synthetic construct
  source 1..21: mol_type = other RNA
  modified_base 1: mod_base = OTHER; note = 2'-O-methyl modified nucleotide with thiophosphate linkage
  modified_base 2: mod_base = OTHER; note = 2'-fluoro modified nucleotide with thiophosphate linkage
  modified_base 3: mod_base = OTHER; note = 2'-O-methyl modified nucleotide
  modified_base 4: mod_base = OTHER; note = 2'-O-methyl modified nucleotide
  modified_base 5: mod_base = OTHER; note = 2'-O-methyl modified nucleotide
  modified_base 6: mod_base = OTHER; note = 2'-O-methyl modified nucleotide
  modified_base 7: mod_base = OTHER; note = 2'-fluoro modified nucleotide
  modified_base 8: mod_base = OTHER; note = 2'-O-methyl modified nucleotide
  modified_base 9: mod_base = OTHER; note = 2'-O-methyl modified nucleotide
  modified_base 10: mod_base = OTHER; note = 2'-O-methyl modified nucleotide
  modified_base 11: mod_base = OTHER; note = 2'-O-methyl modified nucleotide
  modified_base 12: mod_base = OTHER; note = 2'-fluoro modified nucleotide
  modified_base 13: mod_base = OTHER; note = 2'-O-methyl modified nucleotide
  modified_base 14: mod_base = OTHER; note = 2'-fluoro modified nucleotide
  modified_base 15: mod_base = OTHER; note = 2'-O-methyl modified nucleotide
  modified_base 16: mod_base = OTHER; note = 2'-fluoro modified nucleotide
  modified_base 17: mod_base = OTHER; note = 2'-O-methyl modified nucleotide
  modified_base 18: mod_base = OTHER; note = 2'-O-methyl modified nucleotide
  modified_base 19: mod_base = OTHER; note = 2'-O-methyl modified nucleotide with thiophosphate linkage
  modified_base 20: mod_base = OTHER; note = 2'-O-methyl modified nucleotide with thiophosphate linkage
  modified_base 21: mod_base = OTHER; note = 2'-O-methyl modified nucleotide
tcaagactgacatgtccttcg

SEQ ID NO: 397 - RNA, 21 nt, synthetic construct
  source 1..21: mol_type = other RNA
  modified_base 1: mod_base = OTHER; note = 2'-O-methyl modified nucleotide with thiophosphate linkage
  modified_base 2: mod_base = OTHER; note = 2'-fluoro modified nucleotide with thiophosphate linkage
  modified_base 3: mod_base = OTHER; note = 2'-O-methyl modified nucleotide
  modified_base 4: mod_base = OTHER; note = 2'-O-methyl modified nucleotide
  modified_base 5: mod_base = OTHER; note = 2'-O-methyl modified nucleotide
  modified_base 6: mod_base = OTHER; note = 2'-O-methyl modified nucleotide
  modified_base 7: mod_base = OTHER; note = 2'-fluoro modified nucleotide
  modified_base 8: mod_base = OTHER; note = 2'-O-methyl modified nucleotide
  modified_base 9: mod_base = OTHER; note = 2'-O-methyl modified nucleotide
  modified_base 10: mod_base = OTHER; note = 2'-O-methyl modified nucleotide
  modified_base 11: mod_base = OTHER; note = 2'-O-methyl modified nucleotide
  modified_base 12: mod_base = OTHER; note = 2'-fluoro modified nucleotide
  modified_base 13: mod_base = OTHER; note = 2'-O-methyl modified nucleotide
  modified_base 14: mod_base = OTHER; note = 2'-fluoro modified nucleotide
  modified_base 15: mod_base = OTHER; note = 2'-O-methyl modified nucleotide
  modified_base 16: mod_base = OTHER; note = 2'-fluoro modified nucleotide
  modified_base 17: mod_base = OTHER; note = 2'-O-methyl modified nucleotide
  modified_base 18: mod_base = OTHER; note = 2'-O-methyl modified nucleotide
  modified_base 19: mod_base = OTHER; note = 2'-O-methyl modified nucleotide with thiophosphate linkage
  modified_base 20: mod_base = OTHER; note = 2'-O-methyl modified nucleotide with thiophosphate linkage
  modified_base 21: mod_base = OTHER; note = 2'-O-methyl modified nucleotide
tccaagactgacatgtccttg

SEQ ID NO: 398 - RNA, 21 nt, synthetic construct
  source 1..21: mol_type = other RNA
  modified_base 1: mod_base = OTHER; note = 2'-O-methyl modified nucleotide with thiophosphate linkage
  modified_base 2: mod_base = OTHER; note = 2'-fluoro modified nucleotide with thiophosphate linkage
  modified_base 3: mod_base = OTHER; note = 2'-O-methyl modified nucleotide
  modified_base 4: mod_base = OTHER; note = 2'-O-methyl modified nucleotide
  modified_base 5: mod_base = OTHER; note = 2'-O-methyl modified nucleotide
  modified_base 6: mod_base = OTHER; note = 2'-O-methyl modified nucleotide
  modified_base 7: mod_base = OTHER; note = 2'-fluoro modified nucleotide
  modified_base 8: mod_base = OTHER; note = 2'-O-methyl modified nucleotide
  modified_base 9: mod_base = OTHER; note = 2'-O-methyl modified nucleotide
  modified_base 10: mod_base = OTHER; note = 2'-O-methyl modified nucleotide
  modified_base 11: mod_base = OTHER; note = 2'-O-methyl modified nucleotide
  modified_base 12: mod_base = OTHER; note = 2'-fluoro modified nucleotide
  modified_base 13: mod_base = OTHER; note = 2'-O-methyl modified nucleotide
  modified_base 14: mod_base = OTHER; note = 2'-fluoro modified nucleotide
  modified_base 15: mod_base = OTHER; note = 2'-O-methyl modified nucleotide
  modified_base 16: mod_base = OTHER; note = 2'-fluoro modified nucleotide
  modified_base 17: mod_base = OTHER; note = 2'-O-methyl modified nucleotide
  modified_base 18: mod_base = OTHER; note = 2'-O-methyl modified nucleotide
  modified_base 19: mod_base = OTHER; note = 2'-O-methyl modified nucleotide with thiophosphate linkage
  modified_base 20: mod_base = OTHER; note = 2'-O-methyl modified nucleotide with thiophosphate linkage
  modified_base 21: mod_base = OTHER; note = 2'-O-methyl modified nucleotide
tcatagaggaccaagactgag

SEQ ID NO: 399 - RNA, 21 nt, synthetic construct
  source 1..21: mol_type = other RNA
  modified_base 1: mod_base = OTHER; note = 2'-O-methyl modified nucleotide with thiophosphate linkage
  modified_base 2: mod_base = OTHER; note = 2'-fluoro modified nucleotide with thiophosphate linkage
  modified_base 3: mod_base = OTHER; note = 2'-O-methyl modified nucleotide
  modified_base 4: mod_base = OTHER; note = 2'-O-methyl modified nucleotide
  modified_base 5: mod_base = OTHER; note = 2'-O-methyl modified nucleotide
  modified_base 6: mod_base = OTHER; note = 2'-O-methyl modified nucleotide
  modified_base 7: mod_base = OTHER; note = 2'-fluoro modified nucleotide
  modified_base 8: mod_base = OTHER; note = 2'-O-methyl modified nucleotide
  modified_base 9: mod_base = OTHER; note = 2'-O-methyl modified nucleotide
  modified_base 10: mod_base = OTHER; note = 2'-O-methyl modified nucleotide
  modified_base 11: mod_base = OTHER; note = 2'-O-methyl modified nucleotide
  modified_base 12: mod_base = OTHER; note = 2'-fluoro modified nucleotide
  modified_base 13: mod_base = OTHER; note = 2'-O-methyl modified nucleotide
  modified_base 14: mod_base = OTHER; note = 2'-fluoro modified nucleotide
  modified_base 15: mod_base = OTHER; note = 2'-O-methyl modified nucleotide
  modified_base 16: mod_base = OTHER; note = 2'-fluoro modified nucleotide
  modified_base 17: mod_base = OTHER; note = 2'-O-methyl modified nucleotide
  modified_base 18: mod_base = OTHER; note = 2'-O-methyl modified nucleotide
  modified_base 19: mod_base = OTHER; note = 2'-O-methyl modified nucleotide with thiophosphate linkage
  modified_base 20: mod_base = OTHER; note = 2'-O-methyl modified nucleotide with thiophosphate linkage
  modified_base 21: mod_base = OTHER; note = 2'-O-methyl modified nucleotide
tcatggtataacaccaaggag

SEQ ID NO: 400 - RNA, 21 nt, synthetic construct
  source 1..21: mol_type = other RNA
  modified_base 1: mod_base = OTHER; note = 2'-O-methyl modified nucleotide with thiophosphate linkage
  modified_base 2: mod_base = OTHER; note = 2'-fluoro modified nucleotide with thiophosphate linkage
  modified_base 3: mod_base = OTHER; note = 2'-O-methyl modified nucleotide
  modified_base 4: mod_base = OTHER; note = 2'-O-methyl modified nucleotide
  modified_base 5: mod_base = OTHER; note = 2'-O-methyl modified nucleotide
  modified_base 6: mod_base = OTHER; note = 2'-O-methyl modified nucleotide
  modified_base 7: mod_base = OTHER; note = 2'-fluoro modified nucleotide
  modified_base 8: mod_base = OTHER; note = 2'-O-methyl modified nucleotide
  modified_base 9: mod_base = OTHER; note = 2'-O-methyl modified nucleotide
  modified_base 10: mod_base = OTHER; note = 2'-O-methyl modified nucleotide
  modified_base 11: mod_base = OTHER; note = 2'-O-methyl modified nucleotide
  modified_base 12: mod_base = OTHER; note = 2'-fluoro modified nucleotide
  modified_base 13: mod_base = OTHER; note = 2'-O-methyl modified nucleotide
  modified_base 14: mod_base = OTHER; note = 2'-fluoro modified nucleotide
  modified_base 15: mod_base = OTHER; note = 2'-O-methyl modified nucleotide
  modified_base 16: mod_base = OTHER; note = 2'-fluoro modified nucleotide
  modified_base 17: mod_base = OTHER; note = 2'-O-methyl modified nucleotide
  modified_base 18: mod_base = OTHER; note = 2'-O-methyl modified nucleotide
  modified_base 19: mod_base = OTHER; note = 2'-O-methyl modified nucleotide with thiophosphate linkage
  modified_base 20: mod_base = OTHER; note = 2'-O-methyl modified nucleotide with thiophosphate linkage
  modified_base 21: mod_base = OTHER; note = 2'-O-methyl modified nucleotide
tgatccatggtataacaccac

SEQ ID NO: 401 - RNA, 21 nt, synthetic construct
  source 1..21: mol_type = other RNA
  modified_base 1: mod_base = OTHER; note = 2'-O-methyl modified nucleotide with thiophosphate linkage
  modified_base 2: mod_base = OTHER; note = 2'-fluoro modified nucleotide with thiophosphate linkage
  modified_base 3: mod_base = OTHER; note = 2'-O-methyl modified nucleotide
  modified_base 4: mod_base = OTHER; note = 2'-O-methyl modified nucleotide
  modified_base 5: mod_base = OTHER; note = 2'-O-methyl modified nucleotide
  modified_base 6: mod_base = OTHER; note = 2'-O-methyl modified nucleotide
  modified_base 7: mod_base = OTHER; note = 2'-fluoro modified nucleotide
  modified_base 8: mod_base = OTHER; note = 2'-O-methyl modified nucleotide
  modified_base 9: mod_base = OTHER; note = 2'-O-methyl modified nucleotide
  modified_base 10: mod_base = OTHER; note = 2'-O-methyl modified nucleotide
  modified_base 11: mod_base = OTHER; note = 2'-O-methyl modified nucleotide
  modified_base 12: mod_base = OTHER; note = 2'-fluoro modified nucleotide
  modified_base 13: mod_base = OTHER; note = 2'-O-methyl modified nucleotide
  modified_base 14: mod_base = OTHER; note = 2'-fluoro modified nucleotide
  modified_base 15: mod_base = OTHER; note = 2'-O-methyl modified nucleotide
  modified_base 16: mod_base = OTHER; note = 2'-fluoro modified nucleotide
  modified_base 17: mod_base = OTHER; note = 2'-O-methyl modified nucleotide
  modified_base 18: mod_base = OTHER; note = 2'-O-methyl modified nucleotide
  modified_base 19: mod_base = OTHER; note = 2'-O-methyl modified nucleotide with thiophosphate linkage
  modified_base 20: mod_base = OTHER; note = 2'-O-methyl modified nucleotide with thiophosphate linkage
  modified_base 21: mod_base = OTHER; note = 2'-O-methyl modified nucleotide
tggatccatggtataacaccc

SEQ ID NO: 402 - RNA, 21 nt, synthetic construct
  source 1..21: mol_type = other RNA
  modified_base 1: mod_base = OTHER; note = 2'-O-methyl modified nucleotide with thiophosphate linkage
  modified_base 2: mod_base = OTHER; note = 2'-fluoro modified nucleotide with thiophosphate linkage
  modified_base 3: mod_base = OTHER; note = 2'-O-methyl modified nucleotide
  modified_base 4: mod_base = OTHER; note = 2'-O-methyl modified nucleotide
  modified_base 5: mod_base = OTHER; note = 2'-O-methyl modified nucleotide
  modified_base 6: mod_base = OTHER; note = 2'-O-methyl modified nucleotide
  modified_base 7: mod_base = OTHER; note = 2'-fluoro modified nucleotide
  modified_base 8: mod_base = OTHER; note = 2'-O-methyl modified nucleotide
  modified_base 9: mod_base = OTHER; note = 2'-O-methyl modified nucleotide
  modified_base 10: mod_base = OTHER; note = 2'-O-methyl modified nucleotide
  modified_base 11: mod_base = OTHER; note = 2'-O-methyl modified nucleotide
  modified_base 12: mod_base = OTHER; note = 2'-fluoro modified nucleotide
  modified_base 13: mod_base = OTHER; note = 2'-O-methyl modified nucleotide
  modified_base 14: mod_base = OTHER; note = 2'-fluoro modified nucleotide
  modified_base 15: mod_base = OTHER; note = 2'-O-methyl modified nucleotide
  modified_base 16: mod_base = OTHER; note = 2'-fluoro modified nucleotide
  modified_base 17: mod_base = OTHER; note = 2'-O-methyl modified nucleotide
  modified_base 18: mod_base = OTHER; note = 2'-O-methyl modified nucleotide
  modified_base 19: mod_base = OTHER; note = 2'-O-methyl modified nucleotide with thiophosphate linkage
  modified_base 20: mod_base = OTHER; note = 2'-O-methyl modified nucleotide with thiophosphate linkage
  modified_base 21: mod_base = OTHER; note = 2'-O-methyl modified nucleotide
tattgggatccatggtataag

SEQ ID NO: 403 - RNA, 21 nt, synthetic construct
  source 1..21: mol_type = other RNA
  modified_base 1: mod_base = OTHER; note = 2'-O-methyl modified nucleotide with thiophosphate linkage
  modified_base 2: mod_base = OTHER; note = 2'-fluoro modified nucleotide with thiophosphate linkage
  modified_base 3: mod_base = OTHER; note = 2'-O-methyl modified nucleotide
  modified_base 4: mod_base = OTHER; note = 2'-O-methyl modified nucleotide
  modified_base 5: mod_base = OTHER; note = 2'-O-methyl modified nucleotide
  modified_base 6: mod_base = OTHER; note = 2'-O-methyl modified nucleotide
  modified_base 7: mod_base = OTHER; note = 2'-fluoro modified nucleotide
  modified_base 8: mod_base = OTHER; note = 2'-O-methyl modified nucleotide
  modified_base 9: mod_base = OTHER; note = 2'-O-methyl modified nucleotide
  modified_base 10: mod_base = OTHER; note = 2'-O-methyl modified nucleotide
  modified_base 11: mod_base = OTHER; note = 2'-O-methyl modified nucleotide
  modified_base 12: mod_base = OTHER; note = 2'-fluoro modified nucleotide
  modified_base 13: mod_base = OTHER; note = 2'-O-methyl modified nucleotide
  modified_base 14: mod_base = OTHER; note = 2'-fluoro modified nucleotide
  modified_base 15: mod_base = OTHER; note = 2'-O-methyl modified nucleotide
  modified_base 16: mod_base = OTHER; note = 2'-fluoro modified nucleotide
  modified_base 17: mod_base = OTHER; note = 2'-O-methyl modified nucleotide
  modified_base 18: mod_base = OTHER; note = 2'-O-methyl modified nucleotide
  modified_base 19: mod_base = OTHER; note = 2'-O-methyl modified nucleotide with thiophosphate linkage
  modified_base 20: mod_base = OTHER; note = 2'-O-methyl modified nucleotide with thiophosphate linkage
  modified_base 21: mod_base = OTHER; note = 2'-O-methyl modified nucleotide
tacattgggatccatggtatc

SEQ ID NO: 404 - RNA, 21 nt, synthetic construct
  source 1..21: mol_type = other RNA
  modified_base 1: mod_base = OTHER; note = 2'-O-methyl modified nucleotide with thiophosphate linkage
  modified_base 2: mod_base = OTHER; note = 2'-fluoro modified nucleotide with thiophosphate linkage
  modified_base 3: mod_base = OTHER; note = 2'-O-methyl modified nucleotide
  modified_base 4: mod_base = OTHER; note = 2'-O-methyl modified nucleotide
  modified_base 5: mod_base = OTHER; note = 2'-O-methyl modified nucleotide
  modified_base 6: mod_base = OTHER; note = 2'-O-methyl modified nucleotide
  modified_base 7: mod_base = OTHER; note = 2'-fluoro modified nucleotide
  modified_base 8: mod_base = OTHER; note = 2'-O-methyl modified nucleotide
  modified_base 9: mod_base = OTHER; note = 2'-O-methyl modified nucleotide
  modified_base 10: mod_base = OTHER; note = 2'-O-methyl modified nucleotide
  modified_base 11: mod_base = OTHER; note = 2'-O-methyl modified nucleotide
  modified_base 12: mod_base = OTHER; note = 2'-fluoro modified nucleotide
  modified_base 13: mod_base = OTHER; note = 2'-O-methyl modified nucleotide
  modified_base 14: mod_base = OTHER; note = 2'-fluoro modified nucleotide
  modified_base 15: mod_base = OTHER; note = 2'-O-methyl modified nucleotide
  modified_base 16: mod_base = OTHER; note = 2'-fluoro modified nucleotide
  modified_base 17: mod_base = OTHER; note = 2'-O-methyl modified nucleotide
  modified_base 18: mod_base = OTHER; note = 2'-O-methyl modified nucleotide
  modified_base 19: mod_base = OTHER; note = 2'-O-methyl modified nucleotide with thiophosphate linkage
  modified_base 20: mod_base = OTHER; note = 2'-O-methyl modified nucleotide with thiophosphate linkage
  modified_base 21: mod_base = OTHER; note = 2'-O-methyl modified nucleotide
tcactggacattgtgtcaggc

SEQ ID NO: 405 - RNA, 21 nt, synthetic construct
  source 1..21: mol_type = other RNA
  modified_base 1: mod_base = OTHER; note = 2'-O-methyl modified nucleotide with thiophosphate linkage
  modified_base 2: mod_base = OTHER; note = 2'-fluoro modified nucleotide with thiophosphate linkage
  modified_base 3: mod_base = OTHER; note = 2'-O-methyl modified nucleotide
  modified_base 4: mod_base = OTHER; note = 2'-O-methyl modified nucleotide
  modified_base 5: mod_base = OTHER; note = 2'-O-methyl modified nucleotide
  modified_base 6: mod_base = OTHER; note = 2'-O-methyl modified nucleotide
  modified_base 7: mod_base = OTHER; note = 2'-fluoro modified nucleotide
  modified_base 8: mod_base = OTHER; note = 2'-O-methyl modified nucleotide
  modified_base 9: mod_base = OTHER; note = 2'-O-methyl modified nucleotide
  modified_base 10: mod_base = OTHER; note = 2'-O-methyl modified nucleotide
  modified_base 11: mod_base = OTHER; note = 2'-O-methyl modified nucleotide
  modified_base 12: mod_base = OTHER; note = 2'-fluoro modified nucleotide
  modified_base 13: mod_base = OTHER; note = 2'-O-methyl modified nucleotide
  modified_base 14: mod_base = OTHER; note = 2'-fluoro modified nucleotide
  modified_base 15: mod_base = OTHER; note = 2'-O-methyl modified nucleotide
  modified_base 16: mod_base = OTHER; note = 2'-fluoro modified nucleotide
  modified_base 17: mod_base = OTHER; note = 2'-O-methyl modified nucleotide
  modified_base 18: mod_base = OTHER; note = 2'-O-methyl modified nucleotide
  modified_base 19: mod_base = OTHER; note = 2'-O-methyl modified nucleotide with thiophosphate linkage
  modified_base 20: mod_base = OTHER; note = 2'-O-methyl modified nucleotide with thiophosphate linkage
  modified_base 21: mod_base = OTHER; note = 2'-O-methyl modified nucleotide
ttgtcactggacattgtgtcc

SEQ ID NO: 406 - RNA, 21 nt, synthetic construct
  source 1..21: mol_type = other RNA
  modified_base 1: mod_base = OTHER; note = 2'-O-methyl modified nucleotide with thiophosphate linkage
  modified_base 2: mod_base = OTHER; note = 2'-fluoro modified nucleotide with thiophosphate linkage
  modified_base 3: mod_base = OTHER; note = 2'-O-methyl modified nucleotide
  modified_base 4: mod_base = OTHER; note = 2'-O-methyl modified nucleotide
  modified_base 5: mod_base = OTHER; note = 2'-O-methyl modified nucleotide
  modified_base 6: mod_base = OTHER; note = 2'-O-methyl modified nucleotide
  modified_base 7: mod_base = OTHER; note = 2'-fluoro modified nucleotide
  modified_base 8: mod_base = OTHER; note = 2'-O-methyl modified nucleotide
  modified_base 9: mod_base = OTHER; note = 2'-O-methyl modified nucleotide
  modified_base 10: mod_base = OTHER; note = 2'-O-methyl modified nucleotide
  modified_base 11: mod_base = OTHER; note = 2'-O-methyl modified nucleotide
  modified_base 12: mod_base = OTHER; note = 2'-fluoro modified nucleotide
  modified_base 13: mod_base = OTHER; note = 2'-O-methyl modified nucleotide
  modified_base 14: mod_base = OTHER; note = 2'-fluoro modified nucleotide
  modified_base 15: mod_base = OTHER; note = 2'-O-methyl modified nucleotide
  modified_base 16: mod_base = OTHER; note = 2'-fluoro modified nucleotide
  modified_base 17: mod_base = OTHER; note = 2'-O-methyl modified nucleotide
  modified_base 18: mod_base = OTHER; note = 2'-O-methyl modified nucleotide
  modified_base 19: mod_base = OTHER; note = 2'-O-methyl modified nucleotide with thiophosphate linkage
  modified_base 20: mod_base = OTHER; note = 2'-O-methyl modified nucleotide with thiophosphate linkage
  modified_base 21: mod_base = OTHER; note = 2'-O-methyl modified nucleotide
tgattctgtcactggacattc

SEQ ID NO: 407 - RNA, 21 nt, synthetic construct
  source 1..21: mol_type = other RNA
  modified_base 1: mod_base = OTHER; note = 2'-O-methyl modified nucleotide with thiophosphate linkage
  modified_base 2: mod_base = OTHER; note = 2'-fluoro modified nucleotide with thiophosphate linkage
  modified_base 3: mod_base = OTHER; note = 2'-O-methyl modified nucleotide
  modified_base 4: mod_base = OTHER; note = 2'-O-methyl modified nucleotide
  modified_base 5: mod_base = OTHER; note = 2'-O-methyl modified nucleotide
  modified_base 6: mod_base = OTHER; note = 2'-O-methyl modified nucleotide
  modified_base 7: mod_base = OTHER; note = 2'-fluoro modified nucleotide
  modified_base 8: mod_base = OTHER; note = 2'-O-methyl modified nucleotide
  modified_base 9: mod_base = OTHER; note = 2'-O-methyl modified nucleotide
  modified_base 10: mod_base = OTHER; note = 2'-O-methyl modified nucleotide
  modified_base 11: mod_base = OTHER; note = 2'-O-methyl modified nucleotide
  modified_base 12: mod_base = OTHER; note = 2'-fluoro modified nucleotide
  modified_base 13: mod_base = OTHER; note = 2'-O-methyl modified nucleotide
  modified_base 14: mod_base = OTHER; note = 2'-fluoro modified nucleotide
  modified_base 15: mod_base = OTHER; note = 2'-O-methyl modified nucleotide
  modified_base 16: mod_base = OTHER; note = 2'-fluoro modified nucleotide
  modified_base 17: mod_base = OTHER; note = 2'-O-methyl modified nucleotide
  modified_base 18: mod_base = OTHER; note = 2'-O-methyl modified nucleotide
  modified_base 19: mod_base = OTHER; note = 2'-O-methyl modified nucleotide with thiophosphate linkage
  modified_base 20: mod_base = OTHER; note = 2'-O-methyl modified nucleotide with thiophosphate linkage
  modified_base 21: mod_base = OTHER; note = 2'-O-methyl modified nucleotide
ttgattctgtcactggacatc

SEQ ID NO: 408 - RNA, 21 nt, synthetic construct
  source 1..21: mol_type = other RNA
  modified_base 1: mod_base = OTHER; note = 2'-O-methyl modified nucleotide with thiophosphate linkage
  modified_base 2: mod_base = OTHER; note = 2'-fluoro modified nucleotide with thiophosphate linkage
  modified_base 3: mod_base = OTHER; note = 2'-O-methyl modified nucleotide
  modified_base 4: mod_base = OTHER; note = 2'-O-methyl modified nucleotide
  modified_base 5: mod_base = OTHER; note = 2'-O-methyl modified nucleotide
  modified_base 6: mod_base = OTHER; note = 2'-O-methyl modified nucleotide
  modified_base 7: mod_base = OTHER; note = 2'-fluoro modified nucleotide
  modified_base 8: mod_base = OTHER; note = 2'-O-methyl modified nucleotide
  modified_base 9: mod_base = OTHER; note = 2'-O-methyl modified nucleotide
  modified_base 10: mod_base = OTHER; note = 2'-O-methyl modified nucleotide
  modified_base 11: mod_base = OTHER; note = 2'-O-methyl modified nucleotide
  modified_base 12: mod_base = OTHER; note = 2'-fluoro modified nucleotide
  modified_base 13: mod_base = OTHER; note = 2'-O-methyl modified nucleotide
  modified_base 14: mod_base = OTHER; note = 2'-fluoro modified nucleotide
  modified_base 15: mod_base = OTHER; note = 2'-O-methyl modified nucleotide
  modified_base 16: mod_base = OTHER; note = 2'-fluoro modified nucleotide
  modified_base 17: mod_base = OTHER; note = 2'-O-methyl modified nucleotide
  modified_base 18: mod_base = OTHER; note = 2'-O-methyl modified nucleotide
  modified_base 19: mod_base = OTHER; note = 2'-O-methyl modified nucleotide with thiophosphate linkage
  modified_base 20: mod_base = OTHER; note = 2'-O-methyl modified nucleotide with thiophosphate linkage
  modified_base 21: mod_base = OTHER; note = 2'-O-methyl modified nucleotide
tttgattctgtcactggacac

SEQ ID NO: 409 - RNA, 21 nt, synthetic construct
  source 1..21: mol_type = other RNA
  modified_base 1: mod_base = OTHER; note = 2'-O-methyl modified nucleotide with thiophosphate linkage
  modified_base 2: mod_base = OTHER; note = 2'-fluoro modified nucleotide with thiophosphate linkage
  modified_base 3: mod_base = OTHER; note = 2'-O-methyl modified nucleotide
  modified_base 4: mod_base = OTHER; note = 2'-O-methyl modified nucleotide
  modified_base 5: mod_base = OTHER; note = 2'-O-methyl modified nucleotide
  modified_base 6: mod_base = OTHER; note = 2'-O-methyl modified nucleotide
  modified_base 7: mod_base = OTHER; note = 2'-fluoro modified nucleotide
  modified_base 8: mod_base = OTHER; note = 2'-O-methyl modified nucleotide
  modified_base 9: mod_base = OTHER; note = 2'-O-methyl modified nucleotide
  modified_base 10: mod_base = OTHER; note = 2'-O-methyl modified nucleotide
  modified_base 11: mod_base = OTHER; note = 2'-O-methyl modified nucleotide
  modified_base 12: mod_base = OTHER; note = 2'-fluoro modified nucleotide
  modified_base 13: mod_base = OTHER; note = 2'-O-methyl modified nucleotide
  modified_base 14: mod_base = OTHER; note = 2'-fluoro modified nucleotide
  modified_base 15: mod_base = OTHER; note = 2'-O-methyl modified nucleotide
  modified_base 16: mod_base = OTHER; note = 2'-fluoro modified nucleotide
  modified_base 17: mod_base = OTHER; note = 2'-O-methyl modified nucleotide
  modified_base 18: mod_base = OTHER; note = 2'-O-methyl modified nucleotide
  modified_base 19: mod_base = OTHER; note = 2'-O-methyl modified nucleotide with thiophosphate linkage
  modified_base 20: mod_base = OTHER; note = 2'-O-methyl modified nucleotide with thiophosphate linkage
  modified_base 21: mod_base = OTHER; note = 2'-O-methyl modified nucleotide
tcttgattctgtcactggacc

SEQ ID NO: 410 - RNA, 21 nt, synthetic construct
  source 1..21: mol_type = other RNA
  modified_base 1: mod_base = OTHER; note = 2'-O-methyl modified nucleotide with thiophosphate linkage
  modified_base 2: mod_base = OTHER; note = 2'-fluoro modified nucleotide with thiophosphate linkage
  modified_base 3: mod_base = OTHER; note = 2'-O-methyl modified nucleotide
  modified_base 4: mod_base = OTHER; note = 2'-O-methyl modified nucleotide
  modified_base 5: mod_base = OTHER; note = 2'-O-methyl modified nucleotide
  modified_base 6: mod_base = OTHER; note = 2'-O-methyl modified nucleotide
  modified_base 7: mod_base = OTHER; note = 2'-fluoro modified nucleotide
  modified_base 8: mod_base = OTHER; note = 2'-O-methyl modified nucleotide
  modified_base 9: mod_base = OTHER; note = 2'-O-methyl modified nucleotide
  modified_base 10: mod_base = OTHER; note = 2'-O-methyl modified nucleotide
  modified_base 11: mod_base = OTHER; note = 2'-O-methyl modified nucleotide
  modified_base 12: mod_base = OTHER; note = 2'-fluoro modified nucleotide
  modified_base 13: mod_base = OTHER; note = 2'-O-methyl modified nucleotide
  modified_base 14: mod_base = OTHER; note = 2'-fluoro modified nucleotide
  modified_base 15: mod_base = OTHER; note = 2'-O-methyl modified nucleotide
  modified_base 16: mod_base = OTHER; note = 2'-fluoro modified nucleotide
  modified_base 17: mod_base = OTHER; note = 2'-O-methyl modified nucleotide
  modified_base 18: mod_base = OTHER; note = 2'-O-methyl modified nucleotide
  modified_base 19: mod_base = OTHER; note = 2'-O-methyl modified nucleotide with thiophosphate linkage
  modified_base 20: mod_base = OTHER; note = 2'-O-methyl modified nucleotide with thiophosphate linkage
  modified_base 21: mod_base = OTHER; note = 2'-O-methyl modified nucleotide
tacacttgattctgtcactgc

SEQ ID NO: 411 - RNA, 21 nt, synthetic construct
  source 1..21: mol_type = other RNA
  modified_base 1: mod_base = OTHER; note = 2'-O-methyl modified nucleotide with thiophosphate linkage
  modified_base 2: mod_base = OTHER; note = 2'-fluoro modified nucleotide with thiophosphate linkage
  modified_base 3: mod_base = OTHER; note = 2'-O-methyl modified nucleotide
  modified_base 4: mod_base = OTHER; note = 2'-O-methyl modified nucleotide
  modified_base 5: mod_base = OTHER; note = 2'-O-methyl modified nucleotide
  modified_base 6: mod_base = OTHER; note = 2'-O-methyl modified nucleotide
  modified_base 7: mod_base = OTHER; note = 2'-fluoro modified nucleotide
  modified_base 8: mod_base = OTHER; note = 2'-O-methyl modified nucleotide
  modified_base 9: mod_base = OTHER; note = 2'-O-methyl modified nucleotide
  modified_base 10: mod_base = OTHER; note = 2'-O-methyl modified nucleotide
  modified_base 11: mod_base = OTHER; note = 2'-O-methyl modified nucleotide
  modified_base 12: mod_base = OTHER; note = 2'-fluoro modified nucleotide
  modified_base 13: mod_base = OTHER; note = 2'-O-methyl modified nucleotide
  modified_base 14: mod_base = OTHER; note = 2'-fluoro modified nucleotide
  modified_base 15: mod_base = OTHER; note = 2'-O-methyl modified nucleotide
  modified_base 16: mod_base = OTHER; note = 2'-fluoro modified nucleotide
  modified_base 17: mod_base = OTHER; note = 2'-O-methyl modified nucleotide
  modified_base 18: mod_base = OTHER; note = 2'-O-methyl modified nucleotide
  modified_base 19: mod_base = OTHER; note = 2'-O-methyl modified nucleotide with thiophosphate linkage
  modified_base 20: mod_base = OTHER; note = 2'-O-methyl modified nucleotide with thiophosphate linkage
  modified_base 21: mod_base = OTHER; note = 2'-O-methyl modified nucleotide
ttgtaacagtggtggagaatc

SEQ ID NO: 412 - RNA, 21 nt, synthetic construct
  source 1..21: mol_type = other RNA
  modified_base 1: mod_base = OTHER; note = 2'-O-methyl modified nucleotide with thiophosphate linkage
  modified_base 2: mod_base = OTHER; note = 2'-fluoro modified nucleotide with thiophosphate linkage
  modified_base 3: mod_base = OTHER; note = 2'-O-methyl modified nucleotide
  modified_base 4: mod_base = OTHER; note = 2'-O-methyl modified nucleotide
  modified_base 5: mod_base = OTHER; note = 2'-O-methyl modified nucleotide
  modified_base 6: mod_base = OTHER; note = 2'-O-methyl modified nucleotide
  modified_base 7: mod_base = OTHER; note = 2'-fluoro modified nucleotide
  modified_base 8: mod_base = OTHER; note = 2'-O-methyl modified nucleotide
  modified_base 9: mod_base = OTHER; note = 2'-O-methyl modified nucleotide
  modified_base 10: mod_base = OTHER; note = 2'-O-methyl modified nucleotide
  modified_base 11: mod_base = OTHER; note = 2'-O-methyl modified nucleotide
  modified_base 12: mod_base = OTHER; note = 2'-fluoro modified nucleotide
  modified_base 13: mod_base = OTHER; note = 2'-O-methyl modified nucleotide
  modified_base 14: mod_base = OTHER; note = 2'-fluoro modified nucleotide
  modified_base 15: mod_base = OTHER; note = 2'-O-methyl modified nucleotide
  modified_base 16: mod_base = OTHER; note = 2'-fluoro modified nucleotide
  modified_base 17: mod_base = OTHER; note = 2'-O-methyl modified nucleotide
  modified_base 18: mod_base = OTHER; note = 2'-O-methyl modified nucleotide
  modified_base 19: mod_base = OTHER; note = 2'-O-methyl modified nucleotide with thiophosphate linkage
  modified_base 20: mod_base = OTHER; note = 2'-O-methyl modified nucleotide with thiophosphate linkage
  modified_base 21: mod_base = OTHER; note = 2'-O-methyl modified nucleotide
tcttcctgtaacagtggtggc

SEQ ID NO: 413 - RNA, 21 nt, synthetic construct
  source 1..21: mol_type = other RNA
  modified_base 1: mod_base = OTHER; note = 2'-O-methyl modified nucleotide with thiophosphate linkage
  modified_base 2: mod_base = OTHER; note = 2'-fluoro modified nucleotide with thiophosphate linkage
  modified_base 3: mod_base = OTHER; note = 2'-O-methyl modified nucleotide
  modified_base 4: mod_base = OTHER; note = 2'-O-methyl modified nucleotide
  modified_base 5: mod_base = OTHER; note = 2'-O-methyl modified nucleotide
  modified_base 6: mod_base = OTHER; note = 2'-O-methyl modified nucleotide
  modified_base 7: mod_base = OTHER; note = 2'-fluoro modified nucleotide
  modified_base 8: mod_base = OTHER; note = 2'-O-methyl modified nucleotide
  modified_base 9: mod_base = OTHER; note = 2'-O-methyl modified nucleotide
  modified_base 10: mod_base = OTHER; note = 2'-O-methyl modified nucleotide
  modified_base 11: mod_base = OTHER; note = 2'-O-methyl modified nucleotide
  modified_base 12: mod_base = OTHER; note = 2'-fluoro modified nucleotide
  modified_base 13: mod_base = OTHER; note = 2'-O-methyl modified nucleotide
  modified_base 14: mod_base = OTHER; note = 2'-fluoro modified nucleotide
  modified_base 15: mod_base = OTHER; note = 2'-O-methyl modified nucleotide
  modified_base 16: mod_base = OTHER; note = 2'-fluoro modified nucleotide
  modified_base 17: mod_base = OTHER; note = 2'-O-methyl modified nucleotide
  modified_base 18: mod_base = OTHER; note = 2'-O-methyl modified nucleotide
  modified_base 19: mod_base = OTHER; note = 2'-O-methyl modified nucleotide with thiophosphate linkage
  modified_base 20: mod_base = OTHER; note = 2'-O-methyl modified nucleotide with thiophosphate linkage
  modified_base 21: mod_base = OTHER; note = 2'-O-methyl modified nucleotide
tcatttgggtagtattctgtc

SEQ ID NO: 414 - RNA, 21 nt, synthetic construct
  source 1..21: mol_type = other RNA
  modified_base 1: mod_base = OTHER; note = 2'-O-methyl modified nucleotide with thiophosphate linkage
  modified_base 2: mod_base = OTHER; note = 2'-fluoro modified nucleotide with thiophosphate linkage
  modified_base 3: mod_base = OTHER; note = 2'-O-methyl modified nucleotide
  modified_base 4: mod_base = OTHER; note = 2'-O-methyl modified nucleotide
  modified_base 5: mod_base = OTHER; note = 2'-O-methyl modified nucleotide
  modified_base 6: mod_base = OTHER; note = 2'-O-methyl modified nucleotide
  modified_base 7: mod_base = OTHER; note = 2'-fluoro modified nucleotide
  modified_base 8: mod_base = OTHER; note = 2'-O-methyl modified nucleotide
  modified_base 9: mod_base = OTHER; note = 2'-O-methyl modified nucleotide
  modified_base 10: mod_base = OTHER; note = 2'-O-methyl modified nucleotide
  modified_base 11: mod_base = OTHER; note = 2'-O-methyl modified nucleotide
  modified_base 12: mod_base = OTHER; note = 2'-fluoro modified nucleotide
  modified_base 13: mod_base = OTHER; note = 2'-O-methyl modified nucleotide
  modified_base 14: mod_base = OTHER; note = 2'-fluoro modified nucleotide
  modified_base 15: mod_base = OTHER; note = 2'-O-methyl modified nucleotide
  modified_base 16: mod_base = OTHER; note = 2'-fluoro modified nucleotide
  modified_base 17: mod_base = OTHER; note = 2'-O-methyl modified nucleotide
  modified_base 18: mod_base = OTHER; note = 2'-O-methyl modified nucleotide
  modified_base 19: mod_base = OTHER; note = 2'-O-methyl modified nucleotide with thiophosphate linkage
  modified_base 20: mod_base = OTHER; note = 2'-O-methyl modified nucleotide with thiophosphate linkage
  modified_base 21: mod_base = OTHER; note = 2'-O-methyl modified nucleotide
tccatttgggtagtattctgc

SEQ ID NO: 415 - RNA, 21 nt, synthetic construct
  source 1..21: mol_type = other RNA
  modified_base 1: mod_base = OTHER; note = 2'-O-methyl modified nucleotide with thiophosphate linkage
  modified_base 2: mod_base = OTHER; note = 2'-fluoro modified nucleotide with thiophosphate linkage
  modified_base 3: mod_base = OTHER; note = 2'-O-methyl modified nucleotide
  modified_base 4: mod_base = OTHER; note = 2'-O-methyl modified nucleotide
  modified_base 5: mod_base = OTHER; note = 2'-O-methyl modified nucleotide
  modified_base 6: mod_base = OTHER; note = 2'-O-methyl modified nucleotide
  modified_base 7: mod_base = OTHER; note = 2'-fluoro modified nucleotide
  modified_base 8: mod_base = OTHER; note = 2'-O-methyl modified nucleotide
  modified_base 9: mod_base = OTHER; note = 2'-O-methyl modified nucleotide
  modified_base 10: mod_base = OTHER; note = 2'-O-methyl modified nucleotide
  modified_base 11: mod_base = OTHER; note = 2'-O-methyl modified nucleotide
  modified_base 12: mod_base = OTHER; note = 2'-fluoro modified nucleotide
  modified_base 13: mod_base = OTHER; note = 2'-O-methyl modified nucleotide
  modified_base 14: mod_base = OTHER; note = 2'-fluoro modified nucleotide
  modified_base 15: mod_base = OTHER; note = 2'-O-methyl modified nucleotide
  modified_base 16: mod_base = OTHER; note = 2'-fluoro modified nucleotide
  modified_base 17: mod_base = OTHER; note = 2'-O-methyl modified nucleotide
  modified_base 18: mod_base = OTHER; note = 2'-O-methyl modified nucleotide
  modified_base 19: mod_base = OTHER; note = 2'-O-methyl modified nucleotide with thiophosphate linkage
  modified_base 20: mod_base = OTHER; note = 2'-O-methyl modified nucleotide with thiophosphate linkage
  modified_base 21: mod_base = OTHER; note = 2'-O-methyl modified nucleotide
tataacaccaagggcgaatcc

SEQ ID NO: 416 - RNA, 21 nt, synthetic construct
  source 1..21: mol_type = other RNA
  modified_base 1: mod_base = OTHER; note = 2'-O-methyl modified nucleotide with thiophosphate linkage
  modified_base 2: mod_base = OTHER; note = 2'-fluoro modified nucleotide with thiophosphate linkage
  modified_base 3: mod_base = OTHER; note = 2'-O-methyl modified nucleotide
  modified_base 4: mod_base = OTHER; note = 2'-O-methyl modified nucleotide
  modified_base 5: mod_base = OTHER; note = 2'-O-methyl modified nucleotide
  modified_base 6: mod_base = OTHER; note = 2'-O-methyl modified nucleotide
  modified_base 7: mod_base = OTHER; note = 2'-fluoro modified nucleotide
  modified_base 8: mod_base = OTHER; note = 2'-O-methyl modified nucleotide
  modified_base 9: mod_base = OTHER; note = 2'-O-methyl modified nucleotide
  modified_base 10: mod_base = OTHER; note = 2'-O-methyl modified nucleotide
  modified_base 11: mod_base = OTHER; note = 2'-O-methyl modified nucleotide
  modified_base 12: mod_base = OTHER; note = 2'-fluoro modified nucleotide
  modified_base 13: mod_base = OTHER; note = 2'-O-methyl modified nucleotide
  modified_base 14: mod_base = OTHER; note = 2'-fluoro modified nucleotide
  modified_base 15: mod_base = OTHER; note = 2'-O-methyl modified nucleotide
  modified_base 16: mod_base = OTHER; note = 2'-fluoro modified nucleotide
  modified_base 17: mod_base = OTHER; note = 2'-O-methyl modified nucleotide
  modified_base 18: mod_base = OTHER; note = 2'-O-methyl modified nucleotide
  modified_base 19: mod_base = OTHER; note = 2'-O-methyl modified nucleotide with thiophosphate linkage
  modified_base 20: mod_base = OTHER; note = 2'-O-methyl modified nucleotide with thiophosphate linkage
  modified_base 21: mod_base = OTHER; note = 2'-O-methyl modified nucleotide
ttataacaccaagggcgaatg

SEQ ID NO: 417 - RNA, 21 nt, synthetic construct
  source 1..21: mol_type = other RNA
  modified_base 1: mod_base = OTHER; note = 2'-O-methyl modified nucleotide with thiophosphate linkage
  modified_base 2: mod_base = OTHER; note = 2'-fluoro modified nucleotide with thiophosphate linkage
  modified_base 3: mod_base = OTHER; note = 2'-O-methyl modified nucleotide
  modified_base 4: mod_base = OTHER; note = 2'-O-methyl modified nucleotide
  modified_base 5: mod_base = OTHER; note = 2'-O-methyl modified nucleotide
  modified_base 6: mod_base = OTHER; note = 2'-O-methyl modified nucleotide
  modified_base 7: mod_base = OTHER; note = 2'-fluoro modified nucleotide
  modified_base 8: mod_base = OTHER; note = 2'-O-methyl modified nucleotide
  modified_base 9: mod_base = OTHER; note = 2'-O-methyl modified nucleotide
  modified_base 10: mod_base = OTHER; note = 2'-O-methyl modified nucleotide
  modified_base 11: mod_base = OTHER; note = 2'-O-methyl modified nucleotide
  modified_base 12: mod_base = OTHER; note = 2'-fluoro modified nucleotide
  modified_base 13: mod_base = OTHER; note = 2'-O-methyl modified nucleotide
  modified_base 14: mod_base = OTHER; note = 2'-fluoro modified nucleotide
  modified_base 15: mod_base = OTHER; note = 2'-O-methyl modified nucleotide
  modified_base 16: mod_base = OTHER; note = 2'-fluoro modified nucleotide
  modified_base 17: mod_base = OTHER; note = 2'-O-methyl modified nucleotide
  modified_base 18: mod_base = OTHER; note = 2'-O-methyl modified nucleotide
  modified_base 19: mod_base = OTHER; note = 2'-O-methyl modified nucleotide with thiophosphate linkage
  modified_base 20: mod_base = OTHER; note = 2'-O-methyl modified nucleotide with thiophosphate linkage
  modified_base 21: mod_base = OTHER; note = 2'-O-methyl modified nucleotide
tggtataacaccaagggcgac

SEQ ID NO: 418 - RNA, 21 nt, synthetic construct
  source 1..21: mol_type = other RNA
  modified_base 1: mod_base = OTHER; note = 2'-O-methyl modified nucleotide with thiophosphate linkage
  modified_base 2: mod_base = OTHER; note = 2'-fluoro modified nucleotide with thiophosphate linkage
  modified_base 3: mod_base = OTHER; note = 2'-O-methyl modified nucleotide
  modified_base 4: mod_base = OTHER; note = 2'-O-methyl modified nucleotide
  modified_base 5: mod_base = OTHER; note = 2'-O-methyl modified nucleotide
  modified_base 6: mod_base = OTHER; note = 2'-O-methyl modified nucleotide
  modified_base 7: mod_base = OTHER; note = 2'-fluoro modified nucleotide
  modified_base 8: mod_base = OTHER; note = 2'-O-methyl modified nucleotide
  modified_base 9: mod_base = OTHER; note = 2'-O-methyl modified nucleotide
  modified_base 10: mod_base = OTHER; note = 2'-O-methyl modified nucleotide
  modified_base 11: mod_base = OTHER; note = 2'-O-methyl modified nucleotide
  modified_base 12: mod_base = OTHER; note = 2'-fluoro modified nucleotide
  modified_base 13: mod_base = OTHER; note = 2'-O-methyl modified nucleotide
  modified_base 14: mod_base = OTHER; note = 2'-fluoro modified nucleotide
  modified_base 15: mod_base = OTHER; note = 2'-O-methyl modified nucleotide
  modified_base 16: mod_base = OTHER; note = 2'-fluoro modified nucleotide
  modified_base 17: mod_base = OTHER; note = 2'-O-methyl modified nucleotide
  modified_base 18: mod_base = OTHER; note = 2'-O-methyl modified nucleotide
  modified_base 19: mod_base = OTHER; note = 2'-O-methyl modified nucleotide with thiophosphate linkage
  modified_base 20: mod_base = OTHER; note = 2'-O-methyl modified nucleotide with thiophosphate linkage
  modified_base 21: mod_base = OTHER; note = 2'-O-methyl modified nucleotide
tcatggtataacaccaagggg

SEQ ID NO: 419 - RNA, 21 nt, synthetic construct
  source 1..21: mol_type = other RNA
  modified_base 1: mod_base = OTHER; note = 2'-O-methyl modified nucleotide with thiophosphate linkage
  modified_base 2: mod_base = OTHER; note = 2'-fluoro modified nucleotide with thiophosphate linkage
  modified_base 3: mod_base = OTHER; note = 2'-O-methyl modified nucleotide
  modified_base 4: mod_base = OTHER; note = 2'-O-methyl modified nucleotide
  modified_base 5: mod_base = OTHER; note = 2'-O-methyl modified nucleotide
  modified_base 6: mod_base = OTHER; note = 2'-O-methyl modified nucleotide
  modified_base 7: mod_base = OTHER; note = 2'-fluoro modified nucleotide
  modified_base 8: mod_base = OTHER; note = 2'-O-methyl modified nucleotide
  modified_base 9: mod_base = OTHER; note = 2'-O-methyl modified nucleotide
  modified_base 10: mod_base = OTHER; note = 2'-O-methyl modified nucleotide
  modified_base 11: mod_base = OTHER; note = 2'-O-methyl modified nucleotide
  modified_base 12: mod_base = OTHER; note = 2'-fluoro modified nucleotide
  modified_base 13: mod_base = OTHER; note = 2'-O-methyl modified nucleotide
  modified_base 14: mod_base = OTHER; note = 2'-fluoro modified nucleotide
  modified_base 15: mod_base = OTHER; note = 2'-O-methyl modified nucleotide
  modified_base 16: mod_base = OTHER; note = 2'-fluoro modified nucleotide
  modified_base 17: mod_base = OTHER; note = 2'-O-methyl modified nucleotide
  modified_base 18: mod_base = OTHER; note = 2'-O-methyl modified nucleotide
  modified_base 19: mod_base = OTHER; note = 2'-O-methyl modified nucleotide with thiophosphate linkage
  modified_base 20: mod_base = OTHER; note = 2'-O-methyl modified nucleotide with thiophosphate linkage
  modified_base 21: mod_base = OTHER; note = 2'-O-methyl modified nucleotide
tgattctgtcactggacatcc

SEQ ID NO: 420 - RNA, 21 nt, synthetic construct
  source 1..21: mol_type = other RNA
  modified_base 1: mod_base = OTHER; note = 2'-O-methyl modified nucleotide with thiophosphate linkage
  modified_base 2: mod_base = OTHER; note = 2'-fluoro modified nucleotide with thiophosphate linkage
  modified_base 3: mod_base = OTHER; note = 2'-O-methyl modified nucleotide
  modified_base 4: mod_base = OTHER; note = 2'-O-methyl modified nucleotide
  modified_base 5: mod_base = OTHER; note = 2'-O-methyl modified nucleotide
  modified_base 6: mod_base = OTHER; note = 2'-O-methyl modified nucleotide
  modified_base 7: mod_base = OTHER; note = 2'-fluoro modified nucleotide
  modified_base 8: mod_base = OTHER; note = 2'-O-methyl modified nucleotide
  modified_base 9: mod_base = OTHER; note = 2'-O-methyl modified nucleotide
  modified_base 10: mod_base = OTHER; note = 2'-O-methyl modified nucleotide
  modified_base 11: mod_base = OTHER; note = 2'-O-methyl modified nucleotide
  modified_base 12: mod_base = OTHER; note = 2'-fluoro modified nucleotide
  modified_base 13: mod_base = OTHER; note = 2'-O-methyl modified nucleotide
  modified_base 14: mod_base = OTHER; note = 2'-fluoro modified nucleotide
  modified_base 15: mod_base = OTHER; note = 2'-O-methyl modified nucleotide
  modified_base 16: mod_base = OTHER; note = 2'-fluoro modified nucleotide
  modified_base 17: mod_base = OTHER; note = 2'-O-methyl modified nucleotide
  modified_base 18: mod_base = OTHER; note = 2'-O-methyl modified nucleotide
  modified_base 19: mod_base = OTHER; note = 2'-O-methyl modified nucleotide with thiophosphate linkage
  modified_base 20: mod_base = OTHER; note = 2'-O-methyl modified nucleotide with thiophosphate linkage
  modified_base 21: mod_base = OTHER; note = 2'-O-methyl modified nucleotide
ttgttcagaaggagcctctgc

SEQ ID NO: 421 - RNA, 21 nt, synthetic construct
  source 1..21: mol_type = other RNA
  modified_base 1: mod_base = OTHER; note = 2'-O-methyl modified nucleotide with thiophosphate linkage
  modified_base 2: mod_base = OTHER; note = 2'-fluoro modified nucleotide with thiophosphate linkage
  modified_base 3: mod_base = OTHER; note = 2'-O-methyl modified nucleotide
  modified_base 4: mod_base = OTHER; note = 2'-O-methyl modified nucleotide
  modified_base 5: mod_base = OTHER; note = 2'-O-methyl modified nucleotide
  modified_base 6: mod_base = OTHER; note = 2'-O-methyl modified nucleotide
  modified_base 7: mod_base = OTHER; note = 2'-fluoro modified nucleotide
  modified_base 8: mod_base = OTHER; note = 2'-O-methyl modified nucleotide
  modified_base 9: mod_base = OTHER; note = 2'-O-methyl modified nucleotide
  modified_base 10: mod_base = OTHER; note = 2'-O-methyl modified nucleotide
  modified_base 11: mod_base = OTHER; note = 2'-O-methyl modified nucleotide
  modified_base 12: mod_base = OTHER; note = 2'-fluoro modified nucleotide
  modified_base 13: mod_base = OTHER; note = 2'-O-methyl modified nucleotide
  modified_base 14: mod_base = OTHER; note = 2'-fluoro modified nucleotide
  modified_base 15: mod_base = OTHER; note = 2'-O-methyl modified nucleotide
  modified_base 16: mod_base = OTHER; note = 2'-fluoro modified nucleotide
  modified_base 17: mod_base = OTHER; note = 2'-O-methyl modified nucleotide
  modified_base 18: mod_base = OTHER; note = 2'-O-methyl modified nucleotide
  modified_base 19: mod_base = OTHER; note = 2'-O-methyl modified nucleotide with thiophosphate linkage
  modified_base 20: mod_base = OTHER; note = 2'-O-methyl modified nucleotide with thiophosphate linkage
  modified_base 21: mod_base = OTHER; note = 2'-O-methyl modified nucleotide
ttatcatagatgaccaagatc

SEQ ID NO: 422 - RNA, 21 nt, synthetic construct
  source 1..21: mol_type = other RNA
  modified_base 1: mod_base = OTHER; note = 2'-O-methyl modified nucleotide with thiophosphate linkage
  modified_base 2: mod_base = OTHER; note = 2'-fluoro modified nucleotide with thiophosphate linkage
  modified_base 3: mod_base = OTHER; note = 2'-O-methyl modified nucleotide
  modified_base 4: mod_base = OTHER; note = 2'-O-methyl modified nucleotide
  modified_base 5: mod_base = OTHER; note = 2'-O-methyl modified nucleotide
  modified_base 6: mod_base = OTHER; note = 2'-O-methyl modified nucleotide
  modified_base 7: mod_base = OTHER; note = 2'-fluoro modified nucleotide
  modified_base 8: mod_base = OTHER; note = 2'-O-methyl modified nucleotide
  modified_base 9: mod_base = OTHER; note = 2'-O-methyl modified nucleotide
  modified_base 10: mod_base = OTHER; note = 2'-O-methyl modified nucleotide
  modified_base 11: mod_base = OTHER; note = 2'-O-methyl modified nucleotide
  modified_base 12: mod_base = OTHER; note = 2'-fluoro modified nucleotide
  modified_base 13: mod_base = OTHER; note = 2'-O-methyl modified nucleotide
  modified_base 14: mod_base = OTHER; note = 2'-fluoro modified nucleotide
  modified_base 15: mod_base = OTHER; note = 2'-O-methyl modified nucleotide
  modified_base 16: mod_base = OTHER; note = 2'-fluoro modified nucleotide
  modified_base 17: mod_base = OTHER; note = 2'-O-methyl modified nucleotide
  modified_base 18: mod_base = OTHER; note = 2'-O-methyl modified nucleotide
  modified_base 19: mod_base = OTHER; note = 2'-O-methyl modified nucleotide with thiophosphate linkage
  modified_base 20: mod_base = OTHER; note = 2'-O-methyl modified nucleotide with thiophosphate linkage
  modified_base 21: mod_base = OTHER; note = 2'-O-methyl modified nucleotide
ttgtttctgagcattgtgtcc

SEQ ID NO: 423 - RNA, 21 nt, synthetic construct
  source 1..21: mol_type = other RNA
  modified_base 1: mod_base = OTHER; note = 2'-O-methyl modified nucleotide with thiophosphate linkage
  modified_base 2: mod_base = OTHER; note = 2'-fluoro modified nucleotide with thiophosphate linkage
  modified_base 3: mod_base = OTHER; note = 2'-O-methyl modified nucleotide
  modified_base 4: mod_base = OTHER; note = 2'-O-methyl modified nucleotide
  modified_base 5: mod_base = OTHER; note = 2'-O-methyl modified nucleotide
  modified_base 6: mod_base = OTHER; note = 2'-O-methyl modified nucleotide
  modified_base 7: mod_base = OTHER; note = 2'-fluoro modified nucleotide
  modified_base 8: mod_base = OTHER; note = 2'-O-methyl modified nucleotide
  modified_base 9: mod_base = OTHER; note = 2'-O-methyl modified nucleotide
  modified_base 10: mod_base = OTHER; note = 2'-O-methyl modified nucleotide
  modified_base 11: mod_base = OTHER; note = 2'-O-methyl modified nucleotide
  modified_base 12: mod_base = OTHER; note = 2'-fluoro modified nucleotide
  modified_base 13: mod_base = OTHER; note = 2'-O-methyl modified nucleotide
  modified_base 14: mod_base = OTHER; note = 2'-fluoro modified nucleotide
  modified_base 15: mod_base = OTHER; note = 2'-O-methyl modified nucleotide
  modified_base 16: mod_base = OTHER; note = 2'-fluoro modified nucleotide
  modified_base 17: mod_base = OTHER; note = 2'-O-methyl modified nucleotide
  modified_base 18: mod_base = OTHER; note = 2'-O-methyl modified nucleotide
  modified_base 19: mod_base = OTHER; note = 2'-O-methyl modified nucleotide with thiophosphate linkage
  modified_base 20: mod_base = OTHER; note = 2'-O-methyl modified nucleotide with thiophosphate linkage
  modified_base 21: mod_base = OTHER; note = 2'-O-methyl modified nucleotide
tcattaccatggtagcactgg

SEQ ID NO: 424 - RNA, 21 nt, synthetic construct
  source 1..21: mol_type = other RNA
  modified_base 1: mod_base = OTHER; note = 2'-O-methyl modified nucleotide with thiophosphate linkage
  modified_base 2: mod_base = OTHER; note = 2'-O-methyl modified nucleotide with thiophosphate linkage
  modified_base 3: mod_base = OTHER; note = 2'-O-methyl modified nucleotide
  modified_base 4: mod_base = OTHER; note = 2'-O-methyl modified nucleotide
  modified_base 5: mod_base = OTHER; note = 2'-O-methyl modified nucleotide
  modified_base 6: mod_base = OTHER; note = 2'-O-methyl modified nucleotide
  modified_base 7: mod_base = OTHER; note = 2'-O-methyl modified nucleotide
  modified_base 8: mod_base = OTHER; note = 2'-O-methyl modified nucleotide
  modified_base 9: mod_base = OTHER; note = 2'-fluoro modified nucleotide
  modified_base 10: mod_base = OTHER; note = 2'-O-methyl modified nucleotide
  modified_base 11: mod_base = OTHER; note = 2'-fluoro modified nucleotide
  modified_base 12: mod_base = OTHER; note = 2'-O-methyl modified nucleotide
  modified_base 13: mod_base = OTHER; note = 2'-fluoro modified nucleotide
  modified_base 14: mod_base = OTHER; note = 2'-O-methyl modified nucleotide
  modified_base 15: mod_base = OTHER; note = 2'-O-methyl modified nucleotide
  modified_base 16: mod_base = OTHER; note = 2'-O-methyl modified nucleotide
  modified_base 17: mod_base = OTHER; note = 2'-O-methyl modified nucleotide
  modified_base 18: mod_base = OTHER; note = 2'-O-methyl modified nucleotide
  modified_base 19: mod_base = OTHER; note = 2'-O-methyl modified nucleotide
  modified_base 20: mod_base = OTHER; note = 2'-O-methyl modified nucleotide with thiophosphate linkage
  modified_base 21: mod_base = OTHER; note = 2'-O-methyl modified nucleotide attached to ((2S,4R)-1-(1-(((2R,3R,4R,5R,6R)-3-acetamido-4,5-dihydroxy- 6-(hydroxymethyl)tetrahydro-2H-pyran-2-yl)oxy)-16,16-bis((3 -((3-(5-(((2R,3R,4R,5R,6R)-3-acetamido-4,5-dihydroxy-6-(hyd roxymethyl)tetrahydro-2H-pyran-2-yl)oxy)pentanamido)propyl) amino)-3-oxopropoxy)methyl)-5,11,18-trioxo-14-oxa-6,10,17-t riazanonacosan-29-oyl)-4-hydroxypyrrolidin-2-yl)methyl methyl hydrogen phosphate
cagccccttattgttatacga

SEQ ID NO: 425 - RNA, 21 nt, synthetic construct
  source 1..21: mol_type = other RNA
  modified_base 1: mod_base = OTHER; note = 2'-O-methyl modified nucleotide with thiophosphate linkage
  modified_base 2: mod_base = OTHER; note = 2'-O-methyl modified nucleotide with thiophosphate linkage
  modified_base 3: mod_base = OTHER; note = 2'-O-methyl modified nucleotide
  modified_base 4: mod_base = OTHER; note = 2'-O-methyl modified nucleotide
  modified_base 5: mod_base = OTHER; note = 2'-O-methyl modified nucleotide
  modified_base 6: mod_base = OTHER; note = 2'-O-methyl modified nucleotide
  modified_base 7: mod_base = OTHER; note = 2'-O-methyl modified nucleotide
  modified_base 8: mod_base = OTHER; note = 2'-O-methyl modified nucleotide
  modified_base 9: mod_base = OTHER; note = 2'-fluoro modified nucleotide
  modified_base 10: mod_base = OTHER; note = 2'-O-methyl modified nucleotide
  modified_base 11: mod_base = OTHER; note = 2'-fluoro modified nucleotide
  modified_base 12: mod_base = OTHER; note = 2'-O-methyl modified nucleotide
  modified_base 13: mod_base = OTHER; note = 2'-fluoro modified nucleotide
  modified_base 14: mod_base = OTHER; note = 2'-O-methyl modified nucleotide
  modified_base 15: mod_base = OTHER; note = 2'-O-methyl modified nucleotide
  modified_base 16: mod_base = OTHER; note = 2'-O-methyl modified nucleotide
  modified_base 17: mod_base = OTHER; note = 2'-O-methyl modified nucleotide
  modified_base 18: mod_base = OTHER; note = 2'-O-methyl modified nucleotide
  modified_base 19: mod_base = OTHER; note = 2'-O-methyl modified nucleotide
  modified_base 20: mod_base = OTHER; note = 2'-O-methyl modified nucleotide with thiophosphate linkage
  modified_base 21: mod_base = OTHER; note = 2'-O-methyl modified nucleotide attached to ((2S,4R)-1-(1-(((2R,3R,4R,5R,6R)-3-acetamido-4,5-dihydroxy- 6-(hydroxymethyl)tetrahydro-2H-pyran-2-yl)oxy)-16,16-bis((3 -((3-(5-(((2R,3R,4R,5R,6R)-3-acetamido-4,5-dihydroxy-6-(hyd roxymethyl)tetrahydro-2H-pyran-2-yl)oxy)pentanamido)propyl) amino)-3-oxopropoxy)methyl)-5,11,18-trioxo-14-oxa-6,10,17-t riazanonacosan-29-oyl)-4-hydroxypyrrolidin-2-yl)methyl methyl hydrogen phosphate
agttatcgaggctcattctca

SEQ ID NO: 426 - RNA, 21 nt, synthetic construct
  source 1..21: mol_type = other RNA
  modified_base 1: mod_base = OTHER; note = 2'-O-methyl modified nucleotide with thiophosphate linkage
  modified_base 2: mod_base = OTHER; note = 2'-O-methyl modified nucleotide with thiophosphate linkage
  modified_base 3: mod_base = OTHER; note = 2'-O-methyl modified nucleotide
  modified_base 4: mod_base = OTHER; note = 2'-O-methyl modified nucleotide
  modified_base 5: mod_base = OTHER; note = 2'-O-methyl modified nucleotide
  modified_base 6: mod_base = OTHER; note = 2'-O-methyl modified nucleotide
  modified_base 7: mod_base = OTHER; note = 2'-O-methyl modified nucleotide
  modified_base 8: mod_base = OTHER; note = 2'-O-methyl modified nucleotide
  modified_base 9: mod_base = OTHER; note = 2'-fluoro modified nucleotide
  modified_base 10: mod_base = OTHER; note = 2'-O-methyl modified nucleotide
  modified_base 11: mod_base = OTHER; note = 2'-fluoro modified nucleotide
  modified_base 12: mod_base = OTHER; note = 2'-O-methyl modified nucleotide
  modified_base 13: mod_base = OTHER; note = 2'-fluoro modified nucleotide
  modified_base 14: mod_base = OTHER; note = 2'-O-methyl modified nucleotide
  modified_base 15: mod_base = OTHER; note = 2'-O-methyl modified nucleotide
  modified_base 16: mod_base = OTHER; note = 2'-O-methyl modified nucleotide
  modified_base 17: mod_base = OTHER; note = 2'-O-methyl modified nucleotide
  modified_base 18: mod_base = OTHER; note = 2'-O-methyl modified nucleotide
  modified_base 19: mod_base = OTHER; note = 2'-O-methyl modified nucleotide
  modified_base 20: mod_base = OTHER; note = 2'-O-methyl modified nucleotide with thiophosphate linkage
  modified_base 21: mod_base = OTHER; note = 2'-O-methyl modified nucleotide attached to ((2S,4R)-1-(1-(((2R,3R,4R,5R,6R)-3-acetamido-4,5-dihydroxy- 6-(hydroxymethyl)tetrahydro-2H-pyran-2-yl)oxy)-16,16-bis((3 -((3-(5-(((2R,3R,4R,5R,6R)-3-acetamido-4,5-dihydroxy-6-(hyd roxymethyl)tetrahydro-2H-pyran-2-yl)oxy)pentanamido)propyl) amino)-3-oxopropoxy)methyl)-5,11,18-trioxo-14-oxa-6,10,17-t riazanonacosan-29-oyl)-4-hydroxypyrrolidin-2-yl)methyl methyl hydrogen phosphate
tgacacaatgctcagacgcaa

SEQ ID NO: 427 - RNA, 21 nt, synthetic construct
  source 1..21: mol_type = other RNA
  modified_base 1: mod_base = OTHER; note = 2'-O-methyl modified nucleotide with thiophosphate linkage
  modified_base 2: mod_base = OTHER; note = 2'-O-methyl modified nucleotide with thiophosphate linkage
  modified_base 3: mod_base = OTHER; note = 2'-O-methyl modified nucleotide
  modified_base 4: mod_base = OTHER; note = 2'-O-methyl modified nucleotide
  modified_base 5: mod_base = OTHER; note = 2'-O-methyl modified nucleotide
  modified_base 6: mod_base = OTHER; note = 2'-O-methyl modified nucleotide
  modified_base 7: mod_base = OTHER; note = 2'-O-methyl modified nucleotide
  modified_base 8: mod_base = OTHER; note = 2'-O-methyl modified nucleotide
  modified_base 9: mod_base = OTHER; note = 2'-fluoro modified nucleotide
  modified_base 10: mod_base = OTHER; note = 2'-O-methyl modified nucleotide
  modified_base 11: mod_base = OTHER; note = 2'-fluoro modified nucleotide
  modified_base 12: mod_base = OTHER; note = 2'-O-methyl modified nucleotide
  modified_base 13: mod_base = OTHER; note = 2'-fluoro modified nucleotide
  modified_base 14: mod_base = OTHER; note = 2'-O-methyl modified nucleotide
  modified_base 15: mod_base = OTHER; note = 2'-O-methyl modified nucleotide
  modified_base 16: mod_base = OTHER; note = 2'-O-methyl modified nucleotide
  modified_base 17: mod_base = OTHER; note = 2'-O-methyl modified nucleotide
  modified_base 18: mod_base = OTHER; note = 2'-O-methyl modified nucleotide
  modified_base 19: mod_base = OTHER; note = 2'-O-methyl modified nucleotide
  modified_base 20: mod_base = OTHER; note = 2'-O-methyl modified nucleotide with thiophosphate linkage
  modified_base 21: mod_base = OTHER; note = 2'-O-methyl modified nucleotide attached to ((2S,4R)-1-(1-(((2R,3R,4R,5R,6R)-3-acetamido-4,5-dihydroxy- 6-(hydroxymethyl)tetrahydro-2H-pyran-2-yl)oxy)-16,16-bis((3 -((3-(5-(((2R,3R,4R,5R,6R)-3-acetamido-4,5-dihydroxy-6-(hyd roxymethyl)tetrahydro-2H-pyran-2-yl)oxy)pentanamido)propyl) amino)-3-oxopropoxy)methyl)-5,11,18-trioxo-14-oxa-6,10,17-t riazanonacosan-29-oyl)-4-hydroxypyrrolidin-2-yl)methyl methyl hydrogen phosphate
gacccaaatgctggcttgata

SEQ ID NO: 428 - RNA, 21 nt, synthetic construct
  source 1..21: mol_type = other RNA
  modified_base 1: mod_base = OTHER; note = 2'-O-methyl modified nucleotide with thiophosphate linkage
  modified_base 2: mod_base = OTHER; note = 2'-O-methyl modified nucleotide with thiophosphate linkage
  modified_base 3: mod_base = OTHER; note = 2'-O-methyl modified nucleotide
  modified_base 4: mod_base = OTHER; note = 2'-O-methyl modified nucleotide
  modified_base 5: mod_base = OTHER; note = 2'-O-methyl modified nucleotide
  modified_base 6: mod_base = OTHER; note = 2'-O-methyl modified nucleotide
  modified_base 7: mod_base = OTHER; note = 2'-O-methyl modified nucleotide
  modified_base 8: mod_base = OTHER; note = 2'-O-methyl modified nucleotide
  modified_base 9: mod_base = OTHER; note = 2'-fluoro modified nucleotide
  modified_base 10: mod_base = OTHER; note = 2'-O-methyl modified nucleotide
  modified_base 11: mod_base = OTHER; note = 2'-fluoro modified nucleotide
  modified_base 12: mod_base = OTHER; note = 2'-O-methyl modified nucleotide
  modified_base 13: mod_base = OTHER; note = 2'-fluoro modified nucleotide
  modified_base 14: mod_base = OTHER; note = 2'-O-methyl modified nucleotide
  modified_base 15: mod_base = OTHER; note = 2'-O-methyl modified nucleotide
  modified_base 16: mod_base = OTHER; note = 2'-O-methyl modified nucleotide
  modified_base 17: mod_base = OTHER; note = 2'-O-methyl modified nucleotide
  modified_base 18: mod_base = OTHER; note = 2'-O-methyl modified nucleotide
  modified_base 19: mod_base = OTHER; note = 2'-O-methyl modified nucleotide
  modified_base 20: mod_base = OTHER; note = 2'-O-methyl modified nucleotide with thiophosphate linkage
  modified_base 21: mod_base = OTHER; note = 2'-O-methyl modified nucleotide attached to ((2S,4R)-1-(1-(((2R,3R,4R,5R,6R)-3-acetamido-4,5-dihydroxy- 6-(hydroxymethyl)tetrahydro-2H-pyran-2-yl)oxy)-16,16-bis((3 -((3-(5-(((2R,3R,4R,5R,6R)-3-acetamido-4,5-dihydroxy-6-(hyd roxymethyl)tetrahydro-2H-pyran-2-yl)oxy)pentanamido)propyl) amino)-3-oxopropoxy)methyl)-5,11,18-trioxo-14-oxa-6,10,17-t riazanonacosan-29-oyl)-4-hydroxypyrrolidin-2-yl)methyl methyl hydrogen phosphate
gggtaatggacagagttatca

SEQ ID NO: 429 - RNA, 21 nt, synthetic construct
  source 1..21: mol_type = other RNA
  modified_base 1: mod_base = OTHER; note = 2'-O-methyl modified nucleotide with thiophosphate linkage
  modified_base 2: mod_base = OTHER; note = 2'-O-methyl modified nucleotide with thiophosphate linkage
  modified_base 3: mod_base = OTHER; note = 2'-O-methyl modified nucleotide
  modified_base 4: mod_base = OTHER; note = 2'-O-methyl modified nucleotide
  modified_base 5: mod_base = OTHER; note = 2'-O-methyl modified nucleotide
  modified_base 6: mod_base = OTHER; note = 2'-O-methyl modified nucleotide
  modified_base 7: mod_base = OTHER; note = 2'-O-methyl modified nucleotide
  modified_base 8: mod_base = OTHER; note = 2'-O-methyl modified nucleotide
  modified_base 9: mod_base = OTHER; note = 2'-fluoro modified nucleotide
  modified_base 10: mod_base = OTHER; note = 2'-O-methyl modified nucleotide
  modified_base 11: mod_base = OTHER; note = 2'-fluoro modified nucleotide
  modified_base 12: mod_base = OTHER; note = 2'-O-methyl modified nucleotide
  modified_base 13: mod_base = OTHER; note = 2'-fluoro modified nucleotide
  modified_base 14: mod_base = OTHER; note = 2'-O-methyl modified nucleotide
  modified_base 15: mod_base = OTHER; note = 2'-O-methyl modified nucleotide
  modified_base 16: mod_base = OTHER; note = 2'-O-methyl modified nucleotide
  modified_base 17: mod_base = OTHER; note = 2'-O-methyl modified nucleotide
  modified_base 18: mod_base = OTHER; note = 2'-O-methyl modified nucleotide
  modified_base 19: mod_base = OTHER; note = 2'-O-methyl modified nucleotide
  modified_base 20: mod_base = OTHER; note = 2'-O-methyl modified nucleotide with thiophosphate linkage
  modified_base 21: mod_base = OTHER; note = 2'-O-methyl modified nucleotide attached to ((2S,4R)-1-(1-(((2R,3R,4R,5R,6R)-3-acetamido-4,5-dihydroxy- 6-(hydroxymethyl)tetrahydro-2H-pyran-2-yl)oxy)-16,16-bis((3 -((3-(5-(((2R,3R,4R,5R,6R)-3-acetamido-4,5-dihydroxy-6-(hyd roxymethyl)tetrahydro-2H-pyran-2-yl)oxy)pentanamido)propyl) amino)-3-oxopropoxy)methyl)-5,11,18-trioxo-14-oxa-6,10,17-t riazanonacosan-29-oyl)-4-hydroxypyrrolidin-2-yl)methyl methyl hydrogen phosphate
ctaatggacagagttatcgaa

SEQ ID NO: 430 - RNA, 21 nt, synthetic construct
  source 1..21: mol_type = other RNA
  modified_base 1: mod_base = OTHER; note = 2'-O-methyl modified nucleotide with thiophosphate linkage
  modified_base 2: mod_base = OTHER; note = 2'-O-methyl modified nucleotide with thiophosphate linkage
  modified_base 3: mod_base = OTHER; note = 2'-O-methyl modified nucleotide
  modified_base 4: mod_base = OTHER; note = 2'-O-methyl modified nucleotide
  modified_base 5: mod_base = OTHER; note = 2'-O-methyl modified nucleotide
  modified_base 6: mod_base = OTHER; note = 2'-O-methyl modified nucleotide
  modified_base 7: mod_base = OTHER; note = 2'-O-methyl modified nucleotide
  modified_base 8: mod_base = OTHER; note = 2'-O-methyl modified nucleotide
  modified_base 9: mod_base = OTHER; note = 2'-fluoro modified nucleotide
  modified_base 10: mod_base = OTHER; note = 2'-O-methyl modified nucleotide
  modified_base 11: mod_base = OTHER; note = 2'-fluoro modified nucleotide
  modified_base 12: mod_base = OTHER; note = 2'-O-methyl modified nucleotide
  modified_base 13: mod_base = OTHER; note = 2'-fluoro modified nucleotide
  modified_base 14: mod_base = OTHER; note = 2'-O-methyl modified nucleotide
  modified_base 15: mod_base = OTHER; note = 2'-O-methyl modified nucleotide
  modified_base 16: mod_base = OTHER; note = 2'-O-methyl modified nucleotide
  modified_base 17: mod_base = OTHER; note = 2'-O-methyl modified nucleotide
  modified_base 18: mod_base = OTHER; note = 2'-O-methyl modified nucleotide
  modified_base 19: mod_base = OTHER; note = 2'-O-methyl modified nucleotide
  modified_base 20: mod_base = OTHER; note = 2'-O-methyl modified nucleotide with thiophosphate linkage
  modified_base 21: mod_base = OTHER; note = 2'-O-methyl modified nucleotide attached to ((2S,4R)-1-(1-(((2R,3R,4R,5R,6R)-3-acetamido-4,5-dihydroxy- 6-(hydroxymethyl)tetrahydro-2H-pyran-2-yl)oxy)-16,16-bis((3 -((3-(5-(((2R,3R,4R,5R,6R)-3-acetamido-4,5-dihydroxy-6-(hyd roxymethyl)tetrahydro-2H-pyran-2-yl)oxy)pentanamido)propyl) amino)-3-oxopropoxy)methyl)-5,11,18-trioxo-14-oxa-6,10,17-t riazanonacosan-29-oyl)-4-hydroxypyrrolidin-2-yl)methyl methyl hydrogen phosphate
cagttatcgaggcacatacta

SEQ ID NO: 431 - RNA, 21 nt, synthetic construct
  source 1..21: mol_type = other RNA
  modified_base 1: mod_base = OTHER; note = 2'-O-methyl modified nucleotide with thiophosphate linkage
  modified_base 2: mod_base = OTHER; note = 2'-O-methyl modified nucleotide with thiophosphate linkage
  modified_base 3: mod_base = OTHER; note = 2'-O-methyl modified nucleotide
  modified_base 4: mod_base = OTHER; note = 2'-O-methyl modified nucleotide
  modified_base 5: mod_base = OTHER; note = 2'-O-methyl modified nucleotide
  modified_base 6: mod_base = OTHER; note = 2'-O-methyl modified nucleotide
  modified_base 7: mod_base = OTHER; note = 2'-O-methyl modified nucleotide
  modified_base 8: mod_base = OTHER; note = 2'-O-methyl modified nucleotide
  modified_base 9: mod_base = OTHER; note = 2'-fluoro modified nucleotide
  modified_base 10: mod_base = OTHER; note = 2'-O-methyl modified nucleotide
  modified_base 11: mod_base = OTHER; note = 2'-fluoro modified nucleotide
  modified_base 12: mod_base = OTHER; note = 2'-O-methyl modified nucleotide
  modified_base 13: mod_base = OTHER; note = 2'-fluoro modified nucleotide
  modified_base 14: mod_base = OTHER; note = 2'-O-methyl modified nucleotide
  modified_base 15: mod_base = OTHER; note = 2'-O-methyl modified nucleotide
  modified_base 16: mod_base = OTHER; note = 2'-O-methyl modified nucleotide
  modified_base 17: mod_base = OTHER; note = 2'-O-methyl modified nucleotide
  modified_base 18: mod_base = OTHER; note = 2'-O-methyl modified nucleotide
  modified_base 19: mod_base = OTHER; note = 2'-O-methyl modified nucleotide
  modified_base 20: mod_base = OTHER; note = 2'-O-methyl modified nucleotide with thiophosphate linkage
  modified_base 21: mod_base = OTHER; note = 2'-O-methyl modified nucleotide attached to ((2S,4R)-1-(1-(((2R,3R,4R,5R,6R)-3-acetamido-4,5-dihydroxy- 6-(hydroxymethyl)tetrahydro-2H-pyran-2-yl)oxy)-16,16-bis((3 -((3-(5-(((2R,3R,4R,5R,6R)-3-acetamido-4,5-dihydroxy-6-(hyd roxymethyl)tetrahydro-2H-pyran-2-yl)oxy)pentanamido)propyl) amino)-3-oxopropoxy)methyl)-5,11,18-trioxo-14-oxa-6,10,17-t riazanonacosan-29-oyl)-4-hydroxypyrrolidin-2-yl)methyl methyl hydrogen phosphate
ctactgcaacctgacacaata

SEQ ID NO: 432 - RNA, 21 nt, synthetic construct
  source 1..21: mol_type = other RNA
  modified_base 1: mod_base = OTHER; note = 2'-O-methyl modified nucleotide with thiophosphate linkage
  modified_base 2: mod_base = OTHER; note = 2'-O-methyl modified nucleotide with thiophosphate linkage
  modified_base 3: mod_base = OTHER; note = 2'-O-methyl modified nucleotide
  modified_base 4: mod_base = OTHER; note = 2'-O-methyl modified nucleotide
  modified_base 5: mod_base = OTHER; note = 2'-O-methyl modified nucleotide
  modified_base 6: mod_base = OTHER; note = 2'-O-methyl modified nucleotide
  modified_base 7: mod_base = OTHER; note = 2'-O-methyl modified nucleotide
  modified_base 8: mod_base = OTHER; note = 2'-O-methyl modified nucleotide
  modified_base 9: mod_base = OTHER; note = 2'-fluoro modified nucleotide
  modified_base 10: mod_base = OTHER; note = 2'-O-methyl modified nucleotide
  modified_base 11: mod_base = OTHER; note = 2'-fluoro modified nucleotide
  modified_base 12: mod_base = OTHER; note = 2'-O-methyl modified nucleotide
  modified_base 13: mod_base = OTHER; note = 2'-fluoro modified nucleotide
  modified_base 14: mod_base = OTHER; note = 2'-O-methyl modified nucleotide
  modified_base 15: mod_base = OTHER; note = 2'-O-methyl modified nucleotide
  modified_base 16: mod_base = OTHER; note = 2'-O-methyl modified nucleotide
  modified_base 17: mod_base = OTHER; note = 2'-O-methyl modified nucleotide
  modified_base 18: mod_base = OTHER; note = 2'-O-methyl modified nucleotide
  modified_base 19: mod_base = OTHER; note = 2'-O-methyl modified nucleotide
  modified_base 20: mod_base = OTHER; note = 2'-O-methyl modified nucleotide with thiophosphate linkage
  modified_base 21: mod_base = OTHER; note = 2'-O-methyl modified nucleotide attached to ((2S,4R)-1-(1-(((2R,3R,4R,5R,6R)-3-acetamido-4,5-dihydroxy- 6-(hydroxymethyl)tetrahydro-2H-pyran-2-yl)oxy)-16,16-bis((3 -((3-(5-(((2R,3R,4R,5R,6R)-3-acetamido-4,5-dihydroxy-6-(hyd roxymethyl)tetrahydro-2H-pyran-2-yl)oxy)pentanamido)propyl) amino)-3-oxopropoxy)methyl)-5,11,18-trioxo-14-oxa-6,10,17-t riazanonacosan-29-oyl)-4-hydroxypyrrolidin-2-yl)methyl methyl hydrogen phosphate
cgactgctactaccattatga

SEQ ID NO: 433 - RNA, 21 nt, synthetic construct
  source 1..21: mol_type = other RNA
  modified_base 1: mod_base = OTHER; note = 2'-O-methyl modified nucleotide with thiophosphate linkage
  modified_base 2: mod_base = OTHER; note = 2'-O-methyl modified nucleotide with thiophosphate linkage
  modified_base 3: mod_base = OTHER; note = 2'-O-methyl modified nucleotide
  modified_base 4: mod_base = OTHER; note = 2'-O-methyl modified nucleotide
  modified_base 5: mod_base = OTHER; note = 2'-O-methyl modified nucleotide
  modified_base 6: mod_base = OTHER; note = 2'-O-methyl modified nucleotide
  modified_base 7: mod_base = OTHER; note = 2'-O-methyl modified nucleotide
  modified_base 8: mod_base = OTHER; note = 2'-O-methyl modified nucleotide
  modified_base 9: mod_base = OTHER; note = 2'-fluoro modified nucleotide
  modified_base 10: mod_base = OTHER; note = 2'-O-methyl modified nucleotide
  modified_base 11: mod_base = OTHER; note = 2'-fluoro modified nucleotide
  modified_base 12: mod_base = OTHER; note = 2'-O-methyl modified nucleotide
  modified_base 13: mod_base = OTHER; note = 2'-fluoro modified nucleotide
  modified_base 14: mod_base = OTHER; note = 2'-O-methyl modified nucleotide
  modified_base 15: mod_base = OTHER; note = 2'-O-methyl modified nucleotide
  modified_base 16: mod_base = OTHER; note = 2'-O-methyl modified nucleotide
  modified_base 17: mod_base = OTHER; note = 2'-O-methyl modified nucleotide
  modified_base 18: mod_base = OTHER; note = 2'-O-methyl modified nucleotide
  modified_base 19: mod_base = OTHER; note = 2'-O-methyl modified nucleotide
  modified_base 20: mod_base = OTHER; note = 2'-O-methyl modified nucleotide with thiophosphate linkage
  modified_base 21: mod_base = OTHER; note = 2'-O-methyl modified nucleotide attached to ((2S,4R)-1-(1-(((2R,3R,4R,5R,6R)-3-acetamido-4,5-dihydroxy- 6-(hydroxymethyl)tetrahydro-2H-pyran-2-yl)oxy)-16,16-bis((3 -((3-(5-(((2R,3R,4R,5R,6R)-3-acetamido-4,5-dihydroxy-6-(hyd roxymethyl)tetrahydro-2H-pyran-2-yl)oxy)pentanamido)propyl) amino)-3-oxopropoxy)methyl)-5,11,18-trioxo-14-oxa-6,10,17-t riazanonacosan-29-oyl)-4-hydroxypyrrolidin-2-yl)methyl methyl hydrogen phosphate
gttgccaagcttggtcatcta

SEQ ID NO: 434 - RNA, 21 nt, synthetic construct
  source 1..21: mol_type = other RNA
  modified_base 1: mod_base = OTHER; note = 2'-O-methyl modified nucleotide with thiophosphate linkage
  modified_base 2: mod_base = OTHER; note = 2'-O-methyl modified nucleotide with thiophosphate linkage
  modified_base 3: mod_base = OTHER; note = 2'-O-methyl modified nucleotide
  modified_base 4: mod_base = OTHER; note = 2'-O-methyl modified nucleotide
  modified_base 5: mod_base = OTHER; note = 2'-O-methyl modified nucleotide
  modified_base 6: mod_base = OTHER; note = 2'-O-methyl modified nucleotide
  modified_base 7: mod_base = OTHER; note = 2'-O-methyl modified nucleotide
  modified_base 8: mod_base = OTHER; note = 2'-O-methyl modified nucleotide
  modified_base 9: mod_base = OTHER; note = 2'-fluoro modified nucleotide
  modified_base 10: mod_base = OTHER; note = 2'-O-methyl modified nucleotide
  modified_base 11: mod_base = OTHER; note = 2'-fluoro modified nucleotide
  modified_base 12: mod_base = OTHER; note = 2'-O-methyl modified nucleotide
  modified_base 13: mod_base = OTHER; note = 2'-fluoro modified nucleotide
  modified_base 14: mod_base = OTHER; note = 2'-O-methyl modified nucleotide
  modified_base 15: mod_base = OTHER; note = 2'-O-methyl modified nucleotide
  modified_base 16: mod_base = OTHER; note = 2'-O-methyl modified nucleotide
  modified_base 17: mod_base = OTHER; note = 2'-O-methyl modified nucleotide
  modified_base 18: mod_base = OTHER; note = 2'-O-methyl modified nucleotide
  modified_base 19: mod_base = OTHER; note = 2'-O-methyl modified nucleotide
  modified_base 20: mod_base = OTHER; note = 2'-O-methyl modified nucleotide with thiophosphate linkage
  modified_base 21: mod_base = OTHER; note = 2'-O-methyl modified nucleotide attached to ((2S,4R)-1-(1-(((2R,3R,4R,5R,6R)-3-acetamido-4,5-dihydroxy- 6-(hydroxymethyl)tetrahydro-2H-pyran-2-yl)oxy)-16,16-bis((3 -((3-(5-(((2R,3R,4R,5R,6R)-3-acetamido-4,5-dihydroxy-6-(hyd roxymethyl)tetrahydro-2H-pyran-2-yl)oxy)pentanamido)propyl) amino)-3-oxopropoxy)methyl)-5,11,18-trioxo-14-oxa-6,10,17-t riazanonacosan-29-oyl)-4-hydroxypyrrolidin-2-yl)methyl methyl hydrogen phosphate
cagattcgcccttggtgttaa

SEQ ID NO: 435 - RNA, 21 nt, synthetic construct
  source 1..21: mol_type = other RNA
  modified_base 1: mod_base = OTHER; note = 2'-O-methyl modified nucleotide with thiophosphate linkage
  modified_base 2: mod_base = OTHER; note = 2'-O-methyl modified nucleotide with thiophosphate linkage
  modified_base 3: mod_base = OTHER; note = 2'-O-methyl modified nucleotide
  modified_base 4: mod_base = OTHER; note = 2'-O-methyl modified nucleotide
  modified_base 5: mod_base = OTHER; note = 2'-O-methyl modified nucleotide
  modified_base 6: mod_base = OTHER; note = 2'-O-methyl modified nucleotide
  modified_base 7: mod_base = OTHER; note = 2'-O-methyl modified nucleotide
  modified_base 8: mod_base = OTHER; note = 2'-O-methyl modified nucleotide
  modified_base 9: mod_base = OTHER; note = 2'-fluoro modified nucleotide
  modified_base 10: mod_base = OTHER; note = 2'-O-methyl modified nucleotide
  modified_base 11: mod_base = OTHER; note = 2'-fluoro modified nucleotide
  modified_base 12: mod_base = OTHER; note = 2'-O-methyl modified nucleotide
  modified_base 13: mod_base = OTHER; note = 2'-fluoro modified nucleotide
  modified_base 14: mod_base = OTHER; note = 2'-O-methyl modified nucleotide
  modified_base 15: mod_base = OTHER; note = 2'-O-methyl modified nucleotide
  modified_base 16: mod_base = OTHER; note = 2'-O-methyl modified nucleotide
  modified_base 17: mod_base = OTHER; note = 2'-O-methyl modified nucleotide
  modified_base 18: mod_base = OTHER; note = 2'-O-methyl modified nucleotide
  modified_base 19: mod_base = OTHER; note = 2'-O-methyl modified nucleotide
  modified_base 20: mod_base = OTHER; note = 2'-O-methyl modified nucleotide with thiophosphate linkage
  modified_base 21: mod_base = OTHER; note = 2'-O-methyl modified nucleotide attached to ((2S,4R)-1-(1-(((2R,3R,4R,5R,6R)-3-acetamido-4,5-dihydroxy- 6-(hydroxymethyl)tetrahydro-2H-pyran-2-yl)oxy)-16,16-bis((3 -((3-(5-(((2R,3R,4R,5R,6R)-3-acetamido-4,5-dihydroxy-6-(hyd roxymethyl)tetrahydro-2H-pyran-2-yl)oxy)pentanamido)propyl) amino)-3-oxopropoxy)methyl)-5,11,18-trioxo-14-oxa-6,10,17-t riazanonacosan-29-oyl)-4-hydroxypyrrolidin-2-yl)methyl methyl hydrogen phosphate
cgaaggacatgtcagtcttga

SEQ ID NO: 436 - RNA, 21 nt, synthetic construct
  source 1..21: mol_type = other RNA
  modified_base 1: mod_base = OTHER; note = 2'-O-methyl modified nucleotide with thiophosphate linkage
  modified_base 2: mod_base = OTHER; note = 2'-O-methyl modified nucleotide with thiophosphate linkage
  modified_base 3: mod_base = OTHER; note = 2'-O-methyl modified nucleotide
  modified_base 4: mod_base = OTHER; note = 2'-O-methyl modified nucleotide
  modified_base 5: mod_base = OTHER; note = 2'-O-methyl modified nucleotide
  modified_base 6: mod_base = OTHER; note = 2'-O-methyl modified nucleotide
  modified_base 7: mod_base = OTHER; note = 2'-O-methyl modified nucleotide
  modified_base 8: mod_base = OTHER; note = 2'-O-methyl modified nucleotide
  modified_base 9: mod_base = OTHER; note = 2'-fluoro modified nucleotide
  modified_base 10: mod_base = OTHER; note = 2'-O-methyl modified nucleotide
  modified_base 11: mod_base = OTHER; note = 2'-fluoro modified nucleotide
  modified_base 12: mod_base = OTHER; note = 2'-O-methyl modified nucleotide
  modified_base 13: mod_base = OTHER; note = 2'-fluoro modified nucleotide
  modified_base 14: mod_base = OTHER; note = 2'-O-methyl modified nucleotide
  modified_base 15: mod_base = OTHER; note = 2'-O-methyl modified nucleotide
  modified_base 16: mod_base = OTHER; note = 2'-O-methyl modified nucleotide
  modified_base 17: mod_base = OTHER; note = 2'-O-methyl modified nucleotide
  modified_base 18: mod_base = OTHER; note = 2'-O-methyl modified nucleotide
  modified_base 19: mod_base = OTHER; note = 2'-O-methyl modified nucleotide
  modified_base 20: mod_base = OTHER; note = 2'-O-methyl modified nucleotide with thiophosphate linkage
  modified_base 21: mod_base = OTHER; note = 2'-O-methyl modified nucleotide attached to ((2S,4R)-1-(1-(((2R,3R,4R,5R,6R)-3-acetamido-4,5-dihydroxy- 6-(hydroxymethyl)tetrahydro-2H-pyran-2-yl)oxy)-16,16-bis((3 -((3-(5-(((2R,3R,4R,5R,6R)-3-acetamido-4,5-dihydroxy-6-(hyd roxymethyl)tetrahydro-2H-pyran-2-yl)oxy)pentanamido)propyl) amino)-3-oxopropoxy)methyl)-5,11,18-trioxo-14-oxa-6,10,17-t riazanonacosan-29-oyl)-4-hydroxypyrrolidin-2-yl)methyl methyl hydrogen phosphate
ctccttggtgttataccatga

SEQ ID NO: 437 - RNA, 21 nt, synthetic construct
  source 1..21: mol_type = other RNA
  modified_base 1: mod_base = OTHER; note = 2'-O-methyl modified nucleotide with thiophosphate linkage
  modified_base 2: mod_base = OTHER; note = 2'-O-methyl modified nucleotide with thiophosphate linkage
  modified_base 3: mod_base = OTHER; note = 2'-O-methyl modified nucleotide
  modified_base 4: mod_base = OTHER; note = 2'-O-methyl modified nucleotide
  modified_base 5: mod_base = OTHER; note = 2'-O-methyl modified nucleotide
  modified_base 6: mod_base = OTHER; note = 2'-O-methyl modified nucleotide
  modified_base 7: mod_base = OTHER; note = 2'-O-methyl modified nucleotide
  modified_base 8: mod_base = OTHER; note = 2'-O-methyl modified nucleotide
  modified_base 9: mod_base = OTHER; note = 2'-fluoro modified nucleotide
  modified_base 10: mod_base = OTHER; note = 2'-O-methyl modified nucleotide
  modified_base 11: mod_base = OTHER; note = 2'-fluoro modified nucleotide
  modified_base 12: mod_base = OTHER; note = 2'-O-methyl modified nucleotide
  modified_base 13: mod_base = OTHER; note = 2'-fluoro modified nucleotide
  modified_base 14: mod_base = OTHER; note = 2'-O-methyl modified nucleotide
  modified_base 15: mod_base = OTHER; note = 2'-O-methyl modified nucleotide
  modified_base 16: mod_base = OTHER; note = 2'-O-methyl modified nucleotide
  modified_base 17: mod_base = OTHER; note = 2'-O-methyl modified nucleotide
  modified_base 18: mod_base = OTHER; note = 2'-O-methyl modified nucleotide
  modified_base 19: mod_base = OTHER; note = 2'-O-methyl modified nucleotide
  modified_base 20: mod_base = OTHER; note = 2'-O-methyl modified nucleotide with thiophosphate linkage
  modified_base 21: mod_base = OTHER; note = 2'-O-methyl modified nucleotide attached to ((2S,4R)-1-(1-(((2R,3R,4R,5R,6R)-3-acetamido-4,5-dihydroxy- 6-(hydroxymethyl)tetrahydro-2H-pyran-2-yl)oxy)-16,16-bis((3 -((3-(5-(((2R,3R,4R,5R,6R)-3-acetamido-4,5-dihydroxy-6-(hyd roxymethyl)tetrahydro-2H-pyran-2-yl)oxy)pentanamido)propyl) amino)-3-oxopropoxy)methyl)-5,11,18-trioxo-14-oxa-6,10,17-t riazanonacosan-29-oyl)-4-hydroxypyrrolidin-2-yl)methyl methyl hydrogen phosphate
ccccttggtgttataccatga

SEQ ID NO: 438 - RNA, 21 nt, synthetic construct
  source 1..21: mol_type = other RNA
  modified_base 1: mod_base = OTHER; note = 2'-O-methyl modified nucleotide with thiophosphate linkage
  modified_base 2: mod_base = OTHER; note = 2'-O-methyl modified nucleotide with thiophosphate linkage
  modified_base 3: mod_base = OTHER; note = 2'-O-methyl modified nucleotide
  modified_base 4: mod_base = OTHER; note = 2'-O-methyl modified nucleotide
  modified_base 5: mod_base = OTHER; note = 2'-O-methyl modified nucleotide
  modified_base 6: mod_base = OTHER; note = 2'-O-methyl modified nucleotide
  modified_base 7: mod_base = OTHER; note = 2'-O-methyl modified nucleotide
  modified_base 8: mod_base = OTHER; note = 2'-O-methyl modified nucleotide
  modified_base 9: mod_base = OTHER; note = 2'-fluoro modified nucleotide
  modified_base 10: mod_base = OTHER; note = 2'-O-methyl modified nucleotide
  modified_base 11: mod_base = OTHER; note = 2'-fluoro modified nucleotide
  modified_base 12: mod_base = OTHER; note = 2'-O-methyl modified nucleotide
  modified_base 13: mod_base = OTHER; note = 2'-fluoro modified nucleotide
  modified_base 14: mod_base = OTHER; note = 2'-O-methyl modified nucleotide
  modified_base 15: mod_base = OTHER; note = 2'-O-methyl modified nucleotide
  modified_base 16: mod_base = OTHER; note = 2'-O-methyl modified nucleotide
  modified_base 17: mod_base = OTHER; note = 2'-O-methyl modified nucleotide
  modified_base 18: mod_base = OTHER; note = 2'-O-methyl modified nucleotide
  modified_base 19: mod_base = OTHER; note = 2'-O-methyl modified nucleotide
  modified_base 20: mod_base = OTHER; note = 2'-O-methyl modified nucleotide with thiophosphate linkage
  modified_base 21: mod_base = OTHER; note = 2'-O-methyl modified nucleotide attached to ((2S,4R)-1-(1-(((2R,3R,4R,5R,6R)-3-acetamido-4,5-dihydroxy- 6-(hydroxymethyl)tetrahydro-2H-pyran-2-yl)oxy)-16,16-bis((3 -((3-(5-(((2R,3R,4R,5R,6R)-3-acetamido-4,5-dihydroxy-6-(hyd roxymethyl)tetrahydro-2H-pyran-2-yl)oxy)pentanamido)propyl) amino)-3-oxopropoxy)methyl)-5,11,18-trioxo-14-oxa-6,10,17-t riazanonacosan-29-oyl)-4-hydroxypyrrolidin-2-yl)methyl methyl hydrogen phosphate
ggacacaatgctcagaaacaa

SEQ ID NO: 439 - RNA, 21 nt, synthetic construct
  source 1..21: mol_type = other RNA
  modified_base 1: mod_base = OTHER; note = 2'-O-methyl modified nucleotide attached to 5'-5' thiophosphate inverted abasic site which is attached to O-(1-(((2R,3R,4R,5R,6R)-3-acetamido-4,5-dihydroxy-6-(hydrox ymethyl)tetrahydro-2H-pyran-2-yl)oxy)-9,13-bis(2-((2-(2-((( 2R,3R,4R,5R,6R)-3-acetamido-4,5-dihydroxy-6-(hydroxymethyl) tetrahydro-2H-pyran-2-yl)oxy)ethoxy)ethyl)amino)-2-oxoethyl )-7,14-dioxo-3-oxa-6,9,13-triazanonadecan-19-yl) O-methyl phosphorothioate via a thiophosphate linkage
  modified_base 2: mod_base = OTHER; note = 2'-O-methyl modified nucleotide
  modified_base 3: mod_base = OTHER; note = 2'-O-methyl modified nucleotide
  modified_base 4: mod_base = OTHER; note = 2'-O-methyl modified nucleotide
  modified_base 5: mod_base = OTHER; note = 2'-O-methyl modified nucleotide
  modified_base 6: mod_base = OTHER; note = 2'-O-methyl modified nucleotide
  modified_base 7: mod_base = OTHER; note = 2'-O-methyl modified nucleotide
  modified_base 8: mod_base = OTHER; note = 2'-O-methyl modified nucleotide
  modified_base 9: mod_base = OTHER; note = 2'-fluoro modified nucleotide
  modified_base 10: mod_base = OTHER; note = 2'-O-methyl modified nucleotide
  modified_base 11: mod_base = OTHER; note = 2'-fluoro modified nucleotide
  modified_base 12: mod_base = OTHER; note = 2'-O-methyl modified nucleotide
  modified_base 13: mod_base = OTHER; note = 2'-fluoro modified nucleotide
  modified_base 14: mod_base = OTHER; note = 2'-O-methyl modified nucleotide
  modified_base 15: mod_base = OTHER; note = 2'-O-methyl modified nucleotide
  modified_base 16: mod_base = OTHER; note = 2'-O-methyl modified nucleotide
  modified_base 17: mod_base = OTHER; note = 2'-O-methyl modified nucleotide
  modified_base 18: mod_base = OTHER; note = 2'-O-methyl modified nucleotide
  modified_base 19: mod_base = OTHER; note = 2'-O-methyl modified nucleotide
  modified_base 20: mod_base = OTHER; note = 2'-O-methyl modified nucleotide
  modified_base 21: mod_base = OTHER; note = 2'-O-methyl modified nucleotide attached to 3'-3' thiophosphate inverted abasic site
ctgatggacagagttatcgaa

SEQ ID NO: 440 - RNA, 21 nt, synthetic construct
  source 1..21: mol_type = other RNA
  modified_base 1: mod_base = OTHER; note = 2'-O-methyl modified nucleotide attached to 5'-5' thiophosphate inverted abasic site which is attached to O-(1-(((2R,3R,4R,5R,6R)-3-acetamido-4,5-dihydroxy-6-(hydrox ymethyl)tetrahydro-2H-pyran-2-yl)oxy)-9,13-bis(2-((2-(2-((( 2R,3R,4R,5R,6R)-3-acetamido-4,5-dihydroxy-6-(hydroxymethyl) tetrahydro-2H-pyran-2-yl)oxy)ethoxy)ethyl)amino)-2-oxoethyl )-7,14-dioxo-3-oxa-6,9,13-triazanonadecan-19-yl) O-methyl phosphorothioate via a thiophosphate linkage
  modified_base 2: mod_base = OTHER; note = 2'-O-methyl modified nucleotide
  modified_base 3: mod_base = OTHER; note = 2'-O-methyl modified nucleotide
  modified_base 4: mod_base = OTHER; note = 2'-O-methyl modified nucleotide
  modified_base 5: mod_base = OTHER; note = 2'-O-methyl modified nucleotide
  modified_base 6: mod_base = OTHER; note = 2'-O-methyl modified nucleotide
  modified_base 7: mod_base = OTHER; note = 2'-O-methyl modified nucleotide
  modified_base 8: mod_base = OTHER; note = 2'-O-methyl modified nucleotide
  modified_base 9: mod_base = OTHER; note = 2'-fluoro modified nucleotide
  modified_base 10: mod_base = OTHER; note = 2'-O-methyl modified nucleotide
  modified_base 11: mod_base = OTHER; note = 2'-fluoro modified nucleotide
  modified_base 12: mod_base = OTHER; note = 2'-O-methyl modified nucleotide
  modified_base 13: mod_base = OTHER; note = 2'-fluoro modified nucleotide
  modified_base 14: mod_base = OTHER; note = 2'-O-methyl modified nucleotide
  modified_base 15: mod_base = OTHER; note = 2'-O-methyl modified nucleotide
  modified_base 16: mod_base = OTHER; note = 2'-O-methyl modified nucleotide
  modified_base 17: mod_base = OTHER; note = 2'-O-methyl modified nucleotide
  modified_base 18: mod_base = OTHER; note = 2'-O-methyl modified nucleotide
  modified_base 19: mod_base = OTHER; note = 2'-O-methyl modified nucleotide
  modified_base 20: mod_base = OTHER; note = 2'-O-methyl modified nucleotide
  modified_base 21: mod_base = OTHER; note = 2'-O-methyl modified nucleotide attached to 3'-3' thiophosphate inverted abasic site
ggctccttattgttatacgaa

SEQ ID NO: 441 - RNA, 21 nt, synthetic construct
  source 1..21: mol_type = other RNA
  modified_base 1: mod_base = OTHER; note = 2'-O-methyl modified nucleotide attached to 5'-5' thiophosphate inverted abasic site which is attached to O-(1-(((2R,3R,4R,5R,6R)-3-acetamido-4,5-dihydroxy-6-(hydrox ymethyl)tetrahydro-2H-pyran-2-yl)oxy)-9,13-bis(2-((2-(2-((( 2R,3R,4R,5R,6R)-3-acetamido-4,5-dihydroxy-6-(hydroxymethyl) tetrahydro-2H-pyran-2-yl)oxy)ethoxy)ethyl)amino)-2-oxoethyl )-7,14-dioxo-3-oxa-6,9,13-triazanonadecan-19-yl) O-methyl phosphorothioate via a thiophosphate linkage
  modified_base 2: mod_base = OTHER; note = 2'-O-methyl modified nucleotide
  modified_base 3: mod_base = OTHER; note = 2'-O-methyl modified nucleotide
  modified_base 4: mod_base = OTHER; note = 2'-O-methyl modified nucleotide
  modified_base 5: mod_base = OTHER; note = 2'-O-methyl modified nucleotide
  modified_base 6: mod_base = OTHER; note = 2'-O-methyl modified nucleotide
  modified_base 7: mod_base = OTHER; note = 2'-O-methyl modified nucleotide
  modified_base 8: mod_base = OTHER; note = 2'-O-methyl modified nucleotide
  modified_base 9: mod_base = OTHER; note = 2'-fluoro modified nucleotide
  modified_base 10: mod_base = OTHER; note = 2'-O-methyl modified nucleotide
  modified_base 11: mod_base = OTHER; note = 2'-fluoro modified nucleotide
  modified_base 12: mod_base = OTHER; note = 2'-O-methyl modified nucleotide
  modified_base 13: mod_base = OTHER; note = 2'-fluoro modified nucleotide
  modified_base 14: mod_base = OTHER; note = 2'-O-methyl modified nucleotide
  modified_base 15: mod_base = OTHER; note = 2'-O-methyl modified nucleotide
  modified_base 16: mod_base = OTHER; note = 2'-O-methyl modified nucleotide
  modified_base 17: mod_base = OTHER; note = 2'-O-methyl modified nucleotide
  modified_base 18: mod_base = OTHER; note = 2'-O-methyl modified nucleotide
  modified_base 19: mod_base = OTHER; note = 2'-O-methyl modified nucleotide
  modified_base 20: mod_base = OTHER; note = 2'-O-methyl modified nucleotide
  modified_base 21: mod_base = OTHER; note = 2'-O-methyl modified nucleotide attached to 3'-3' thiophosphate inverted abasic site
gaagcaccaactgagcaaaga

SEQ ID NO: 442 - RNA, 21 nt, synthetic construct
  source 1..21: mol_type = other RNA
  modified_base 1: mod_base = OTHER; note = 2'-O-methyl modified nucleotide attached to 5'-5' thiophosphate inverted abasic site which is attached to O-(1-(((2R,3R,4R,5R,6R)-3-acetamido-4,5-dihydroxy-6-(hydrox ymethyl)tetrahydro-2H-pyran-2-yl)oxy)-9,13-bis(2-((2-(2-((( 2R,3R,4R,5R,6R)-3-acetamido-4,5-dihydroxy-6-(hydroxymethyl) tetrahydro-2H-pyran-2-yl)oxy)ethoxy)ethyl)amino)-2-oxoethyl )-7,14-dioxo-3-oxa-6,9,13-triazanonadecan-19-yl) O-methyl phosphorothioate via a thiophosphate linkage
  modified_base 2: mod_base = OTHER; note = 2'-O-methyl modified nucleotide
  modified_base 3: mod_base = OTHER; note = 2'-O-methyl modified nucleotide
  modified_base 4: mod_base = OTHER; note = 2'-O-methyl modified nucleotide
  modified_base 5: mod_base = OTHER; note = 2'-O-methyl modified nucleotide
  modified_base 6: mod_base = OTHER; note = 2'-O-methyl modified nucleotide
  modified_base 7: mod_base = OTHER; note = 2'-O-methyl modified nucleotide
  modified_base 8: mod_base = OTHER; note = 2'-O-methyl modified nucleotide
  modified_base 9: mod_base = OTHER; note = 2'-fluoro modified nucleotide
  modified_base 10: mod_base = OTHER; note = 2'-O-methyl modified nucleotide
  modified_base 11: mod_base = OTHER; note = 2'-fluoro modified nucleotide
  modified_base 12: mod_base = OTHER; note = 2'-O-methyl modified nucleotide
  modified_base 13: mod_base = OTHER; note = 2'-fluoro modified nucleotide
  modified_base 14: mod_base = OTHER; note = 2'-O-methyl modified nucleotide
  modified_base 15: mod_base = OTHER; note = 2'-O-methyl modified nucleotide
  modified_base 16: mod_base = OTHER; note = 2'-O-methyl modified nucleotide
  modified_base 17: mod_base = OTHER; note = 2'-O-methyl modified nucleotide
  modified_base 18: mod_base = OTHER; note = 2'-O-methyl modified nucleotide
  modified_base 19: mod_base = OTHER; note = 2'-O-methyl modified nucleotide
  modified_base 20: mod_base = OTHER; note = 2'-O-methyl modified nucleotide
  modified_base 21: mod_base = OTHER; note = 2'-O-methyl modified nucleotide attached to 3'-3' thiophosphate inverted abasic site
gggaaatggacagagttatca

SEQ ID NO: 443 - RNA, 21 nt, synthetic construct
  source 1..21: mol_type = other RNA
  modified_base 1: mod_base = OTHER; note = 2'-O-methyl modified nucleotide attached to 5'-5' thiophosphate inverted abasic site which is attached to O-(1-(((2R,3R,4R,5R,6R)-3-acetamido-4,5-dihydroxy-6-(hydrox ymethyl)tetrahydro-2H-pyran-2-yl)oxy)-9,13-bis(2-((2-(2-((( 2R,3R,4R,5R,6R)-3-acetamido-4,5-dihydroxy-6-(hydroxymethyl) tetrahydro-2H-pyran-2-yl)oxy)ethoxy)ethyl)amino)-2-oxoethyl )-7,14-dioxo-3-oxa-6,9,13-triazanonadecan-19-yl) O-methyl phosphorothioate via a thiophosphate linkage
  modified_base 2: mod_base = OTHER; note = 2'-O-methyl modified nucleotide
  modified_base 3: mod_base = OTHER; note = 2'-O-methyl modified nucleotide
  modified_base 4: mod_base = OTHER; note = 2'-O-methyl modified nucleotide
  modified_base 5: mod_base = OTHER; note = 2'-O-methyl modified nucleotide
  modified_base 6: mod_base = OTHER; note = 2'-O-methyl modified nucleotide
  modified_base 7: mod_base = OTHER; note = 2'-O-methyl modified nucleotide
  modified_base 8: mod_base = OTHER; note = 2'-O-methyl modified nucleotide
  modified_base 9: mod_base = OTHER; note = 2'-fluoro modified nucleotide
  modified_base 10: mod_base = OTHER; note = 2'-O-methyl modified nucleotide
  modified_base 11: mod_base = OTHER; note = 2'-fluoro modified nucleotide
  modified_base 12: mod_base = OTHER; note = 2'-O-methyl modified nucleotide
  modified_base 13: mod_base = OTHER; note = 2'-fluoro modified nucleotide
  modified_base 14: mod_base = OTHER; note = 2'-O-methyl modified nucleotide
  modified_base 15: mod_base = OTHER; note = 2'-O-methyl modified nucleotide
  modified_base 16: mod_base = OTHER; note = 2'-O-methyl modified nucleotide
  modified_base 17: mod_base = OTHER; note = 2'-O-methyl modified nucleotide
  modified_base 18: mod_base = OTHER; note = 2'-O-methyl modified nucleotide
  modified_base 19: mod_base = OTHER; note = 2'-O-methyl modified nucleotide
  modified_base 20: mod_base = OTHER; note = 2'-O-methyl modified nucleotide
  modified_base 21: mod_base = OTHER; note = 2'-O-methyl modified nucleotide attached to 3'-3' thiophosphate inverted abasic site
gctgctactaccattatggaa

SEQ ID NO: 444 - RNA, 21 nt, synthetic construct
  source 1..21: mol_type = other RNA
  modified_base 1: mod_base = OTHER; note = 2'-O-methyl modified nucleotide attached to 5'-5' thiophosphate inverted abasic site which is attached to O-(1-(((2R,3R,4R,5R,6R)-3-acetamido-4,5-dihydroxy-6-(hydrox ymethyl)tetrahydro-2H-pyran-2-yl)oxy)-9,13-bis(2-((2-(2-((( 2R,3R,4R,5R,6R)-3-acetamido-4,5-dihydroxy-6-(hydroxymethyl) tetrahydro-2H-pyran-2-yl)oxy)ethoxy)ethyl)amino)-2-oxoethyl )-7,14-dioxo-3-oxa-6,9,13-triazanonadecan-19-yl) O-methyl phosphorothioate via a thiophosphate linkage
  modified_base 2: mod_base = OTHER; note = 2'-O-methyl modified nucleotide
  modified_base 3: mod_base = OTHER; note = 2'-O-methyl modified nucleotide
  modified_base 4: mod_base = OTHER; note = 2'-O-methyl modified nucleotide
  modified_base 5: mod_base = OTHER; note = 2'-O-methyl modified nucleotide
  modified_base 6: mod_base = OTHER; note = 2'-O-methyl modified nucleotide
  modified_base 7: mod_base = OTHER; note = 2'-O-methyl modified nucleotide
  modified_base 8: mod_base = OTHER; note = 2'-O-methyl modified nucleotide
  modified_base 9: mod_base = OTHER; note = 2'-fluoro modified nucleotide
  modified_base 10: mod_base = OTHER; note = 2'-O-methyl modified nucleotide
  modified_base 11: mod_base = OTHER; note = 2'-fluoro modified nucleotide
  modified_base 12: mod_base = OTHER; note = 2'-O-methyl modified nucleotide
  modified_base 13: mod_base = OTHER; note = 2'-fluoro modified nucleotide
  modified_base 14: mod_base = OTHER; note = 2'-O-methyl modified nucleotide
  modified_base 15: mod_base = OTHER; note = 2'-O-methyl modified nucleotide
  modified_base 16: mod_base = OTHER; note = 2'-O-methyl modified nucleotide
  modified_base 17: mod_base = OTHER; note = 2'-O-methyl modified nucleotide
  modified_base 18: mod_base = OTHER; note = 2'-O-methyl modified nucleotide
  modified_base 19: mod_base = OTHER; note = 2'-O-methyl modified nucleotide
  modified_base 20: mod_base = OTHER; note = 2'-O-methyl modified nucleotide
  modified_base 21: mod_base = OTHER; note = 2'-O-methyl modified nucleotide attached to 3'-3' thiophosphate inverted abasic site
caatccagatgctgagattca

SEQ ID NO: 445 - RNA, 21 nt, synthetic construct
  source 1..21: mol_type = other RNA
  modified_base 1: mod_base = OTHER; note = 2'-O-methyl modified nucleotide attached to 5'-5' thiophosphate inverted abasic site which is attached to O-(1-(((2R,3R,4R,5R,6R)-3-acetamido-4,5-dihydroxy-6-(hydrox ymethyl)tetrahydro-2H-pyran-2-yl)oxy)-9,13-bis(2-((2-(2-((( 2R,3R,4R,5R,6R)-3-acetamido-4,5-dihydroxy-6-(hydroxymethyl) tetrahydro-2H-pyran-2-yl)oxy)ethoxy)ethyl)amino)-2-oxoethyl )-7,14-dioxo-3-oxa-6,9,13-triazanonadecan-19-yl) O-methyl phosphorothioate via a thiophosphate linkage
  modified_base 2: mod_base = OTHER; note = 2'-O-methyl modified nucleotide
  modified_base 3: mod_base = OTHER; note = 2'-O-methyl modified nucleotide
  modified_base 4: mod_base = OTHER; note = 2'-O-methyl modified nucleotide
  modified_base 5: mod_base = OTHER; note = 2'-O-methyl modified nucleotide
  modified_base 6: mod_base = OTHER; note = 2'-O-methyl modified nucleotide
  modified_base 7: mod_base = OTHER; note = 2'-O-methyl modified nucleotide
  modified_base 8: mod_base = OTHER; note = 2'-O-methyl modified nucleotide
  modified_base 9: mod_base = OTHER; note = 2'-fluoro modified nucleotide
  modified_base 10: mod_base = OTHER; note = 2'-O-methyl modified nucleotide
  modified_base 11: mod_base = OTHER; note = 2'-fluoro modified nucleotide
  modified_base 12: mod_base = OTHER; note = 2'-O-methyl modified nucleotide
  modified_base 13: mod_base = OTHER; note = 2'-fluoro modified nucleotide
  modified_base 14: mod_base = OTHER; note = 2'-O-methyl modified nucleotide
  modified_base 15: mod_base = OTHER; note = 2'-O-methyl modified nucleotide
  modified_base 16: mod_base = OTHER; note = 2'-O-methyl modified nucleotide
  modified_base 17: mod_base = OTHER; note = 2'-O-methyl modified nucleotide
  modified_base 18: mod_base = OTHER; note = 2'-O-methyl modified nucleotide
  modified_base 19: mod_base = OTHER; note = 2'-O-methyl modified nucleotide
  modified_base 20: mod_base = OTHER; note = 2'-O-methyl modified nucleotide
  modified_base 21: mod_base = OTHER; note = 2'-O-methyl modified nucleotide attached to 3'-3' thiophosphate inverted abasic site
gattctccaccactgttacaa

SEQ ID NO: 446 - RNA, 21 nt, synthetic construct
  source 1..21: mol_type = other RNA
  modified_base 1: mod_base = OTHER; note = 2'-O-methyl modified nucleotide attached to 5'-5' thiophosphate inverted abasic site which is attached to O-(1-(((2R,3R,4R,5R,6R)-3-acetamido-4,5-dihydroxy-6-(hydrox ymethyl)tetrahydro-2H-pyran-2-yl)oxy)-9,13-bis(2-((2-(2-((( 2R,3R,4R,5R,6R)-3-acetamido-4,5-dihydroxy-6-(hydroxymethyl) tetrahydro-2H-pyran-2-yl)oxy)ethoxy)ethyl)amino)-2-oxoethyl )-7,14-dioxo-3-oxa-6,9,13-triazanonadecan-19-yl) O-methyl phosphorothioate via a thiophosphate linkage
  modified_base 2: mod_base = OTHER; note = 2'-O-methyl modified nucleotide
  modified_base 3: mod_base = OTHER; note = 2'-O-methyl modified nucleotide
  modified_base 4: mod_base = OTHER; note = 2'-O-methyl modified nucleotide
  modified_base 5: mod_base = OTHER; note = 2'-O-methyl modified nucleotide
  modified_base 6: mod_base = OTHER; note = 2'-O-methyl modified nucleotide
  modified_base 7: mod_base = OTHER; note = 2'-O-methyl modified nucleotide
  modified_base 8: mod_base = OTHER; note = 2'-O-methyl modified nucleotide
  modified_base 9: mod_base = OTHER; note = 2'-fluoro modified nucleotide
  modified_base 10: mod_base = OTHER; note = 2'-O-methyl modified nucleotide
  modified_base 11: mod_base = OTHER; note = 2'-fluoro modified nucleotide
  modified_base 12: mod_base = OTHER; note = 2'-O-methyl modified nucleotide
  modified_base 13: mod_base = OTHER; note = 2'-fluoro modified nucleotide
  modified_base 14: mod_base = OTHER; note = 2'-O-methyl modified nucleotide
  modified_base 15: mod_base = OTHER; note = 2'-O-methyl modified nucleotide
  modified_base 16: mod_base = OTHER; note = 2'-O-methyl modified nucleotide
  modified_base 17: mod_base = OTHER; note = 2'-O-methyl modified nucleotide
  modified_base 18: mod_base = OTHER; note = 2'-O-methyl modified nucleotide
  modified_base 19: mod_base = OTHER; note = 2'-O-methyl modified nucleotide
  modified_base 20: mod_base = OTHER; note = 2'-O-methyl modified nucleotide
  modified_base 21: mod_base = OTHER; note = 2'-O-methyl modified nucleotide attached to 3'-3' thiophosphate inverted abasic site
gcagaatactacccaaatgga

SEQ ID NO: 447 - RNA, 21 nt, synthetic construct
  source 1..21: mol_type = other RNA
  modified_base 1: mod_base = OTHER; note = 2'-O-methyl modified nucleotide attached to 5'-5' thiophosphate inverted abasic site which is attached to O-(1-(((2R,3R,4R,5R,6R)-3-acetamido-4,5-dihydroxy-6-(hydrox ymethyl)tetrahydro-2H-pyran-2-yl)oxy)-9,13-bis(2-((2-(2-((( 2R,3R,4R,5R,6R)-3-acetamido-4,5-dihydroxy-6-(hydroxymethyl) tetrahydro-2H-pyran-2-yl)oxy)ethoxy)ethyl)amino)-2-oxoethyl )-7,14-dioxo-3-oxa-6,9,13-triazanonadecan-19-yl) O-methyl phosphorothioate via a thiophosphate linkage
  modified_base 2: mod_base = OTHER; note = 2'-O-methyl modified nucleotide
  modified_base 3: mod_base = OTHER; note = 2'-O-methyl modified nucleotide
  modified_base 4: mod_base = OTHER; note = 2'-O-methyl modified nucleotide
  modified_base 5: mod_base = OTHER; note = 2'-O-methyl modified nucleotide
  modified_base 6: mod_base = OTHER; note = 2'-O-methyl modified nucleotide
  modified_base 7: mod_base = OTHER; note = 2'-O-methyl modified nucleotide
  modified_base 8: mod_base = OTHER; note = 2'-O-methyl modified nucleotide
  modified_base 9: mod_base = OTHER; note = 2'-fluoro modified nucleotide
  modified_base 10: mod_base = OTHER; note = 2'-O-methyl modified nucleotide
  modified_base 11: mod_base = OTHER; note = 2'-fluoro modified nucleotide
  modified_base 12: mod_base = OTHER; note = 2'-O-methyl modified nucleotide
  modified_base 13: mod_base = OTHER; note = 2'-fluoro modified nucleotide
  modified_base 14: mod_base = OTHER; note = 2'-O-methyl modified nucleotide
  modified_base 15: mod_base = OTHER; note = 2'-O-methyl modified nucleotide
  modified_base 16: mod_base = OTHER; note = 2'-O-methyl modified nucleotide
  modified_base 17: mod_base = OTHER; note = 2'-O-methyl modified nucleotide
  modified_base 18: mod_base = OTHER; note = 2'-O-methyl modified nucleotide
  modified_base 19: mod_base = OTHER; note = 2'-O-methyl modified nucleotide
  modified_base 20: mod_base = OTHER; note = 2'-O-methyl modified nucleotide
  modified_base 21: mod_base = OTHER; note = 2'-O-methyl modified nucleotide attached to 3'-3' thiophosphate inverted abasic site
ggattcgcccttggtgttata

SEQ ID NO: 448 - RNA, 21 nt, synthetic construct
  source 1..21: mol_type = other RNA
  modified_base 1: mod_base = OTHER; note = 2'-O-methyl modified nucleotide attached to 5'-5' thiophosphate inverted abasic site which is attached to O-(1-(((2R,3R,4R,5R,6R)-3-acetamido-4,5-dihydroxy-6-(hydrox ymethyl)tetrahydro-2H-pyran-2-yl)oxy)-9,13-bis(2-((2-(2-((( 2R,3R,4R,5R,6R)-3-acetamido-4,5-dihydroxy-6-(hydroxymethyl) tetrahydro-2H-pyran-2-yl)oxy)ethoxy)ethyl)amino)-2-oxoethyl )-7,14-dioxo-3-oxa-6,9,13-triazanonadecan-19-yl) O-methyl phosphorothioate via a thiophosphate linkage
  modified_base 2: mod_base = OTHER; note = 2'-O-methyl modified nucleotide
  modified_base 3: mod_base = OTHER; note = 2'-O-methyl modified nucleotide
  modified_base 4: mod_base = OTHER; note = 2'-O-methyl modified nucleotide
  modified_base 5: mod_base = OTHER; note = 2'-O-methyl modified nucleotide
  modified_base 6: mod_base = OTHER; note = 2'-O-methyl modified nucleotide
  modified_base 7: mod_base = OTHER; note = 2'-O-methyl modified nucleotide
  modified_base 8: mod_base = OTHER; note = 2'-O-methyl modified nucleotide
  modified_base 9: mod_base = OTHER; note = 2'-fluoro modified nucleotide
  modified_base 10: mod_base = OTHER; note = 2'-O-methyl modified nucleotide
  modified_base 11: mod_base = OTHER; note = 2'-fluoro modified nucleotide
  modified_base 12: mod_base = OTHER; note = 2'-O-methyl modified nucleotide
  modified_base 13: mod_base = OTHER; note = 2'-fluoro modified nucleotide
  modified_base 14: mod_base = OTHER; note = 2'-O-methyl modified nucleotide
  modified_base 15: mod_base = OTHER; note = 2'-O-methyl modified nucleotide
  modified_base 16: mod_base = OTHER; note = 2'-O-methyl modified nucleotide
  modified_base 17: mod_base = OTHER; note = 2'-O-methyl modified nucleotide
  modified_base 18: mod_base = OTHER; note = 2'-O-methyl modified nucleotide
  modified_base 19: mod_base = OTHER; note = 2'-O-methyl modified nucleotide
  modified_base 20: mod_base = OTHER; note = 2'-O-methyl modified nucleotide
  modified_base 21: mod_base = OTHER; note = 2'-O-methyl modified nucleotide attached to 3'-3' thiophosphate inverted abasic site
cattcgcccttggtgttataa

SEQ ID NO: 449 - RNA, 21 nt, synthetic construct
  source 1..21: mol_type = other RNA
  modified_base 1: mod_base = OTHER; note = 2'-O-methyl modified nucleotide attached to 5'-5' thiophosphate inverted abasic site which is attached to O-(1-(1-(((2R,3R,4R,5R,6R)-3-acetamido-4,5-dihydroxy-6-(hyd roxymethyl)tetrahydro-2H-pyran-2-yl)oxy)-9,13-bis(2-((2-(2- (((2R,3R,4R,5R,6R)-3-acetamido-4,5-dihydroxy-6-(hydroxymeth yl)tetrahydro-2H-pyran-2-yl)oxy)ethoxy)ethyl)amino)-2-oxoet hyl)-7,14-dioxo-3-oxa-6,9,13-triazaoctadecan-18-oyl)piperid in-4-yl) O-methyl phosphorothioate via a thiophosphate linkage
  modified_base 2: mod_base = OTHER; note = 2'-O-methyl modified nucleotide
  modified_base 3: mod_base = OTHER; note = 2'-O-methyl modified nucleotide
  modified_base 4: mod_base = OTHER; note = 2'-O-methyl modified nucleotide
  modified_base 5: mod_base = OTHER; note = 2'-O-methyl modified nucleotide
  modified_base 6: mod_base = OTHER; note = 2'-O-methyl modified nucleotide
  modified_base 7: mod_base = OTHER; note = 2'-O-methyl modified nucleotide
  modified_base 8: mod_base = OTHER; note = 2'-O-methyl modified nucleotide
  modified_base 9: mod_base = OTHER; note = 2'-fluoro modified nucleotide
  modified_base 10: mod_base = OTHER; note = 2'-O-methyl modified nucleotide
  modified_base 11: mod_base = OTHER; note = 2'-fluoro modified nucleotide
  modified_base 12: mod_base = OTHER; note = 2'-O-methyl modified nucleotide
  modified_base 13: mod_base = OTHER; note = 2'-fluoro modified nucleotide
  modified_base 14: mod_base = OTHER; note = 2'-O-methyl modified nucleotide
  modified_base 15: mod_base = OTHER; note = 2'-O-methyl modified nucleotide
  modified_base 16: mod_base = OTHER; note = 2'-O-methyl modified nucleotide
  modified_base 17: mod_base = OTHER; note = 2'-O-methyl modified nucleotide
  modified_base 18: mod_base = OTHER; note = 2'-O-methyl modified nucleotide
  modified_base 19: mod_base = OTHER; note = 2'-O-methyl modified nucleotide
  modified_base 20: mod_base = OTHER; note = 2'-O-methyl modified nucleotide
  modified_base 21: mod_base = OTHER; note = 2'-O-methyl modified nucleotide attached to 3'-3' thiophosphate inverted abasic site
catggacagagttatcgagga

SEQ ID NO: 450 - RNA, 21 nt, synthetic construct
  source 1..21: mol_type = other RNA
  modified_base 1: mod_base = OTHER; note = 2'-O-methyl modified nucleotide attached to 5'-5' thiophosphate inverted abasic site which is attached to O-(1-(1-(((2R,3R,4R,5R,6R)-3-acetamido-4,5-dihydroxy-6-(hyd roxymethyl)tetrahydro-2H-pyran-2-yl)oxy)-9,13-bis(2-((2-(2- (((2R,3R,4R,5R,6R)-3-acetamido-4,5-dihydroxy-6-(hydroxymeth yl)tetrahydro-2H-pyran-2-yl)oxy)ethoxy)ethyl)amino)-2-oxoet hyl)-7,14-dioxo-3-oxa-6,9,13-triazaoctadecan-18-oyl)piperid in-4-yl) O-methyl phosphorothioate via a thiophosphate linkage
  modified_base 2: mod_base = OTHER; note = 2'-O-methyl modified nucleotide
  modified_base 3: mod_base = OTHER; note = 2'-O-methyl modified nucleotide
  modified_base 4: mod_base = OTHER; note = 2'-O-methyl modified nucleotide
  modified_base 5: mod_base = OTHER; note = 2'-O-methyl modified nucleotide
  modified_base 6: mod_base = OTHER; note = 2'-O-methyl modified nucleotide
  modified_base 7: mod_base = OTHER; note = 2'-O-methyl modified nucleotide
  modified_base 8: mod_base = OTHER; note = 2'-O-methyl modified nucleotide
  modified_base 9: mod_base = OTHER; note = 2'-fluoro modified nucleotide
  modified_base 10: mod_base = OTHER; note = 2'-O-methyl modified nucleotide
  modified_base 11: mod_base = OTHER; note = 2'-fluoro modified nucleotide
  modified_base 12: mod_base = OTHER; note = 2'-O-methyl modified nucleotide
  modified_base 13: mod_base = OTHER; note = 2'-fluoro modified nucleotide
  modified_base 14: mod_base = OTHER; note = 2'-O-methyl modified nucleotide
  modified_base 15: mod_base = OTHER; note = 2'-O-methyl modified nucleotide
  modified_base 16: mod_base = OTHER; note = 2'-O-methyl modified nucleotide
  modified_base 17: mod_base = OTHER; note = 2'-O-methyl modified nucleotide
  modified_base 18: mod_base = OTHER; note = 2'-O-methyl modified nucleotide
  modified_base 19: mod_base = OTHER; note = 2'-O-methyl modified nucleotide
  modified_base 20: mod_base = OTHER; note = 2'-O-methyl modified nucleotide
  modified_base 21: mod_base = OTHER; note = 2'-O-methyl modified nucleotide attached to 3'-3' thiophosphate inverted abasic site
gctgccaagcttggtcatcta

SEQ ID NO: 451 - RNA, 21 nt, synthetic construct
  source 1..21: mol_type = other RNA
  modified_base 1: mod_base = OTHER; note = 2'-O-methyl modified nucleotide attached to 5'-5' thiophosphate inverted abasic site which is attached to O-(1-(1-(((2R,3R,4R,5R,6R)-3-acetamido-4,5-dihydroxy-6-(hyd roxymethyl)tetrahydro-2H-pyran-2-yl)oxy)-9,13-bis(2-((2-(2- (((2R,3R,4R,5R,6R)-3-acetamido-4,5-dihydroxy-6-(hydroxymeth yl)tetrahydro-2H-pyran-2-yl)oxy)ethoxy)ethyl)amino)-2-oxoet hyl)-7,14-dioxo-3-oxa-6,9,13-triazaoctadecan-18-oyl)piperid in-4-yl) O-methyl phosphorothioate via a thiophosphate linkage
  modified_base 2: mod_base = OTHER; note = 2'-O-methyl modified nucleotide
  modified_base 3: mod_base = OTHER; note = 2'-O-methyl modified nucleotide
  modified_base 4: mod_base = OTHER; note = 2'-O-methyl modified nucleotide
  modified_base 5: mod_base = OTHER; note = 2'-O-methyl modified nucleotide
  modified_base 6: mod_base = OTHER; note = 2'-O-methyl modified nucleotide
  modified_base 7: mod_base = OTHER; note = 2'-O-methyl modified nucleotide
  modified_base 8: mod_base = OTHER; note = 2'-O-methyl modified nucleotide
  modified_base 9: mod_base = OTHER; note = 2'-fluoro modified nucleotide
  modified_base 10: mod_base = OTHER; note = 2'-O-methyl modified nucleotide
  modified_base 11: mod_base = OTHER; note = 2'-fluoro modified nucleotide
  modified_base 12: mod_base = OTHER; note = 2'-O-methyl modified nucleotide
  modified_base 13: mod_base = OTHER; note = 2'-fluoro modified nucleotide
  modified_base 14: mod_base = OTHER; note = 2'-O-methyl modified nucleotide
  modified_base 15: mod_base = OTHER; note = 2'-O-methyl modified nucleotide
  modified_base 16: mod_base = OTHER; note = 2'-O-methyl modified nucleotide
  modified_base 17: mod_base = OTHER; note = 2'-O-methyl modified nucleotide
  modified_base 18: mod_base = OTHER; note = 2'-O-methyl modified nucleotide
  modified_base 19: mod_base = OTHER; note = 2'-O-methyl modified nucleotide
  modified_base 20: mod_base = OTHER; note = 2'-O-methyl modified nucleotide
  modified_base 21: mod_base = OTHER; note = 2'-O-methyl modified nucleotide attached to 3'-3' thiophosphate inverted abasic site
cccaagcttggtcatctatga

SEQ ID NO: 452 - RNA, 21 nt, synthetic construct
  source 1..21: mol_type = other RNA
  modified_base 1: mod_base = OTHER; note = 2'-O-methyl modified nucleotide attached to 5'-5' thiophosphate inverted abasic site which is attached to O-(1-(1-(((2R,3R,4R,5R,6R)-3-acetamido-4,5-dihydroxy-6-(hyd roxymethyl)tetrahydro-2H-pyran-2-yl)oxy)-9,13-bis(2-((2-(2- (((2R,3R,4R,5R,6R)-3-acetamido-4,5-dihydroxy-6-(hydroxymeth yl)tetrahydro-2H-pyran-2-yl)oxy)ethoxy)ethyl)amino)-2-oxoet hyl)-7,14-dioxo-3-oxa-6,9,13-triazaoctadecan-18-oyl)piperid in-4-yl) O-methyl phosphorothioate via a thiophosphate linkage
  modified_base 2: mod_base = OTHER; note = 2'-O-methyl modified nucleotide
  modified_base 3: mod_base = OTHER; note = 2'-O-methyl modified nucleotide
  modified_base 4: mod_base = OTHER; note = 2'-O-methyl modified nucleotide
  modified_base 5: mod_base = OTHER; note = 2'-O-methyl modified nucleotide
  modified_base 6: mod_base = OTHER; note = 2'-O-methyl modified nucleotide
  modified_base 7: mod_base = OTHER; note = 2'-O-methyl modified nucleotide
  modified_base 8: mod_base = OTHER; note = 2'-O-methyl modified nucleotide
  modified_base 9: mod_base = OTHER; note = 2'-fluoro modified nucleotide
  modified_base 10: mod_base = OTHER; note = 2'-O-methyl modified nucleotide
  modified_base 11: mod_base = OTHER; note = 2'-fluoro modified nucleotide
  modified_base 12: mod_base = OTHER; note = 2'-O-methyl modified nucleotide
  modified_base 13: mod_base = OTHER; note = 2'-fluoro modified nucleotide
  modified_base 14: mod_base = OTHER; note = 2'-O-methyl modified nucleotide
  modified_base 15: mod_base = OTHER; note = 2'-O-methyl modified nucleotide
  modified_base 16: mod_base = OTHER; note = 2'-O-methyl modified nucleotide
  modified_base 17: mod_base = OTHER; note = 2'-O-methyl modified nucleotide
  modified_base 18: mod_base = OTHER; note = 2'-O-methyl modified nucleotide
  modified_base 19: mod_base = OTHER; note = 2'-O-methyl modified nucleotide
  modified_base 20: mod_base = OTHER; note = 2'-O-methyl modified nucleotide
  modified_base 21: mod_base = OTHER; note = 2'-O-methyl modified nucleotide attached to 3'-3' thiophosphate inverted abasic site
ggtgctaccatggtaatggaa

SEQ ID NO: 453 - RNA, 21 nt, synthetic construct
  source 1..21: mol_type = other RNA
  modified_base 1: mod_base = OTHER; note = 2'-O-methyl modified nucleotide attached to 5'-5' thiophosphate inverted abasic site which is attached to O-(1-(1-(((2R,3R,4R,5R,6R)-3-acetamido-4,5-dihydroxy-6-(hyd roxymethyl)tetrahydro-2H-pyran-2-yl)oxy)-9,13-bis(2-((2-(2- (((2R,3R,4R,5R,6R)-3-acetamido-4,5-dihydroxy-6-(hydroxymeth yl)tetrahydro-2H-pyran-2-yl)oxy)ethoxy)ethyl)amino)-2-oxoet hyl)-7,14-dioxo-3-oxa-6,9,13-triazaoctadecan-18-oyl)piperid in-4-yl) O-methyl phosphorothioate via a thiophosphate linkage
  modified_base 2: mod_base = OTHER; note = 2'-O-methyl modified nucleotide
  modified_base 3: mod_base = OTHER; note = 2'-O-methyl modified nucleotide
  modified_base 4: mod_base = OTHER; note = 2'-O-methyl modified nucleotide
  modified_base 5: mod_base = OTHER; note = 2'-O-methyl modified nucleotide
  modified_base 6: mod_base = OTHER; note = 2'-O-methyl modified nucleotide
  modified_base 7: mod_base = OTHER; note = 2'-O-methyl modified nucleotide
  modified_base 8: mod_base = OTHER; note = 2'-O-methyl modified nucleotide
  modified_base 9: mod_base = OTHER; note = 2'-fluoro modified nucleotide
  modified_base 10: mod_base = OTHER; note = 2'-O-methyl modified nucleotide
  modified_base 11: mod_base = OTHER; note = 2'-fluoro modified nucleotide
  modified_base 12: mod_base = OTHER; note = 2'-O-methyl modified nucleotide
  modified_base 13: mod_base = OTHER; note = 2'-fluoro modified nucleotide
  modified_base 14: mod_base = OTHER; note = 2'-O-methyl modified nucleotide
  modified_base 15: mod_base = OTHER; note = 2'-O-methyl modified nucleotide
  modified_base 16: mod_base = OTHER; note = 2'-O-methyl modified nucleotide
  modified_base 17: mod_base = OTHER; note = 2'-O-methyl modified nucleotide
  modified_base 18: mod_base = OTHER; note = 2'-O-methyl modified nucleotide
  modified_base 19: mod_base = OTHER; note = 2'-O-methyl modified nucleotide
  modified_base 20: mod_base = OTHER; note = 2'-O-methyl modified nucleotide
  modified_base 21: mod_base = OTHER; note = 2'-O-methyl modified nucleotide attached to 3'-3' thiophosphate inverted abasic site
gaccatggtaatggacagaga

SEQ ID NO: 454 - RNA, 21 nt, synthetic construct
  source 1..21: mol_type = other RNA
  modified_base 1: mod_base = OTHER; note = 2'-O-methyl modified nucleotide attached to 5'-5' thiophosphate inverted abasic site which is attached to O-(1-(1-(((2R,3R,4R,5R,6R)-3-acetamido-4,5-dihydroxy-6-(hyd roxymethyl)tetrahydro-2H-pyran-2-yl)oxy)-9,13-bis(2-((2-(2- (((2R,3R,4R,5R,6R)-3-acetamido-4,5-dihydroxy-6-(hydroxymeth yl)tetrahydro-2H-pyran-2-yl)oxy)ethoxy)ethyl)amino)-2-oxoet hyl)-7,14-dioxo-3-oxa-6,9,13-triazaoctadecan-18-oyl)piperid in-4-yl) O-methyl phosphorothioate via a thiophosphate linkage
  modified_base 2: mod_base = OTHER; note = 2'-O-methyl modified nucleotide
  modified_base 3: mod_base = OTHER; note = 2'-O-methyl modified nucleotide
  modified_base 4: mod_base = OTHER; note = 2'-O-methyl modified nucleotide
  modified_base 5: mod_base = OTHER; note = 2'-O-methyl modified nucleotide
  modified_base 6: mod_base = OTHER; note = 2'-O-methyl modified nucleotide
  modified_base 7: mod_base = OTHER; note = 2'-O-methyl modified nucleotide
  modified_base 8: mod_base = OTHER; note = 2'-O-methyl modified nucleotide
  modified_base 9: mod_base = OTHER; note = 2'-fluoro modified nucleotide
  modified_base 10: mod_base = OTHER; note = 2'-O-methyl modified nucleotide
  modified_base 11: mod_base = OTHER; note = 2'-fluoro modified nucleotide
  modified_base 12: mod_base = OTHER; note = 2'-O-methyl modified nucleotide
  modified_base 13: mod_base = OTHER; note = 2'-fluoro modified nucleotide
  modified_base 14: mod_base = OTHER; note = 2'-O-methyl modified nucleotide
  modified_base 15: mod_base = OTHER; note = 2'-O-methyl modified nucleotide
  modified_base 16: mod_base = OTHER; note = 2'-O-methyl modified nucleotide
  modified_base 17: mod_base = OTHER; note = 2'-O-methyl modified nucleotide
  modified_base 18: mod_base = OTHER; note = 2'-O-methyl modified nucleotide
  modified_base 19: mod_base = OTHER; note = 2'-O-methyl modified nucleotide
  modified_base 20: mod_base = OTHER; note = 2'-O-methyl modified nucleotide
  modified_base 21: mod_base = OTHER; note = 2'-O-methyl modified nucleotide attached to 3'-3' thiophosphate inverted abasic site
gtggtaatggacagagttata

SEQ ID NO: 455 - RNA, 21 nt, synthetic construct
  source 1..21: mol_type = other RNA
  modified_base 1: mod_base = OTHER; note = 2'-O-methyl modified nucleotide attached to 5'-5' thiophosphate inverted abasic site which is attached to O-(1-(1-(((2R,3R,4R,5R,6R)-3-acetamido-4,5-dihydroxy-6-(hyd roxymethyl)tetrahydro-2H-pyran-2-yl)oxy)-9,13-bis(2-((2-(2- (((2R,3R,4R,5R,6R)-3-acetamido-4,5-dihydroxy-6-(hydroxymeth yl)tetrahydro-2H-pyran-2-yl)oxy)ethoxy)ethyl)amino)-2-oxoet hyl)-7,14-dioxo-3-oxa-6,9,13-triazaoctadecan-18-oyl)piperid in-4-yl) O-methyl phosphorothioate via a thiophosphate linkage
  modified_base 2: mod_base = OTHER; note = 2'-O-methyl modified nucleotide
  modified_base 3: mod_base = OTHER; note = 2'-O-methyl modified nucleotide
  modified_base 4: mod_base = OTHER; note = 2'-O-methyl modified nucleotide
  modified_base 5: mod_base = OTHER; note = 2'-O-methyl modified nucleotide
  modified_base 6: mod_base = OTHER; note = 2'-O-methyl modified nucleotide
  modified_base 7: mod_base = OTHER; note = 2'-O-methyl modified nucleotide
  modified_base 8: mod_base = OTHER; note = 2'-O-methyl modified nucleotide
  modified_base 9: mod_base = OTHER; note = 2'-fluoro modified nucleotide
  modified_base 10: mod_base = OTHER; note = 2'-O-methyl modified nucleotide
  modified_base 11: mod_base = OTHER; note = 2'-fluoro modified nucleotide
  modified_base 12: mod_base = OTHER; note = 2'-O-methyl modified nucleotide
  modified_base 13: mod_base = OTHER; note = 2'-fluoro modified nucleotide
  modified_base 14: mod_base = OTHER; note = 2'-O-methyl modified nucleotide
  modified_base 15: mod_base = OTHER; note = 2'-O-methyl modified nucleotide
  modified_base 16: mod_base = OTHER; note = 2'-O-methyl modified nucleotide
  modified_base 17: mod_base = OTHER; note = 2'-O-methyl modified nucleotide
  modified_base 18: mod_base = OTHER; note = 2'-O-methyl modified nucleotide
  modified_base 19: mod_base = OTHER; note = 2'-O-methyl modified nucleotide
  modified_base 20: mod_base = OTHER; note = 2'-O-methyl modified nucleotide
  modified_base 21: mod_base = OTHER; note = 2'-O-methyl modified nucleotide attached to 3'-3' thiophosphate inverted abasic site
gagagttatcgaggcacataa

SEQ ID NO: 456 - RNA, 21 nt, synthetic construct
  source 1..21: mol_type = other RNA
  modified_base 1: mod_base = OTHER; note = 2'-O-methyl modified nucleotide attached to 5'-5' thiophosphate inverted abasic site which is attached to O-(1-(1-(((2R,3R,4R,5R,6R)-3-acetamido-4,5-dihydroxy-6-(hyd roxymethyl)tetrahydro-2H-pyran-2-yl)oxy)-9,13-bis(2-((2-(2- (((2R,3R,4R,5R,6R)-3-acetamido-4,5-dihydroxy-6-(hydroxymeth yl)tetrahydro-2H-pyran-2-yl)oxy)ethoxy)ethyl)amino)-2-oxoet hyl)-7,14-dioxo-3-oxa-6,9,13-triazaoctadecan-18-oyl)piperid in-4-yl) O-methyl phosphorothioate via a thiophosphate linkage
  modified_base 2: mod_base = OTHER; note = 2'-O-methyl modified nucleotide
  modified_base 3: mod_base = OTHER; note = 2'-O-methyl modified nucleotide
  modified_base 4: mod_base = OTHER; note = 2'-O-methyl modified nucleotide
  modified_base 5: mod_base = OTHER; note = 2'-O-methyl modified nucleotide
  modified_base 6: mod_base = OTHER; note = 2'-O-methyl modified nucleotide
  modified_base 7: mod_base = OTHER; note = 2'-O-methyl modified nucleotide
  modified_base 8: mod_base = OTHER; note = 2'-O-methyl modified nucleotide
  modified_base 9: mod_base = OTHER; note = 2'-fluoro modified nucleotide
  modified_base 10: mod_base = OTHER; note = 2'-O-methyl modified nucleotide
  modified_base 11: mod_base = OTHER; note = 2'-fluoro modified nucleotide
  modified_base 12: mod_base = OTHER; note = 2'-O-methyl modified nucleotide
  modified_base 13: mod_base = OTHER; note = 2'-fluoro modified nucleotide
  modified_base 14: mod_base = OTHER; note = 2'-O-methyl modified nucleotide
  modified_base 15: mod_base = OTHER; note = 2'-O-methyl modified nucleotide
  modified_base 16: mod_base = OTHER; note = 2'-O-methyl modified nucleotide
  modified_base 17: mod_base = OTHER; note = 2'-O-methyl modified nucleotide
  modified_base 18: mod_base = OTHER; note = 2'-O-methyl modified nucleotide
  modified_base 19: mod_base = OTHER; note = 2'-O-methyl modified nucleotide
  modified_base 20: mod_base = OTHER; note = 2'-O-methyl modified nucleotide
  modified_base 21: mod_base = OTHER; note = 2'-O-methyl modified nucleotide attached to 3'-3' thiophosphate inverted abasic site
caaatggacagagttatcaaa

SEQ ID NO: 457 - RNA, 21 nt, synthetic construct
  source 1..21: mol_type = other RNA
  modified_base 1: mod_base = OTHER; note = 2'-O-methyl modified nucleotide attached to 5'-5' thiophosphate inverted abasic site which is attached to O-(1-(1-(((2R,3R,4R,5R,6R)-3-acetamido-4,5-dihydroxy-6-(hyd roxymethyl)tetrahydro-2H-pyran-2-yl)oxy)-9,13-bis(2-((2-(2- (((2R,3R,4R,5R,6R)-3-acetamido-4,5-dihydroxy-6-(hydroxymeth yl)tetrahydro-2H-pyran-2-yl)oxy)ethoxy)ethyl)amino)-2-oxoet hyl)-7,14-dioxo-3-oxa-6,9,13-triazaoctadecan-18-oyl)piperid in-4-yl) O-methyl phosphorothioate via a thiophosphate linkage
  modified_base 2: mod_base = OTHER; note = 2'-O-methyl modified nucleotide
  modified_base 3: mod_base = OTHER; note = 2'-O-methyl modified nucleotide
  modified_base 4: mod_base = OTHER; note = 2'-O-methyl modified nucleotide
  modified_base 5: mod_base = OTHER; note = 2'-O-methyl modified nucleotide
  modified_base 6: mod_base = OTHER; note = 2'-O-methyl modified nucleotide
  modified_base 7: mod_base = OTHER; note = 2'-O-methyl modified nucleotide
  modified_base 8: mod_base = OTHER; note = 2'-O-methyl modified nucleotide
  modified_base 9: mod_base = OTHER; note = 2'-fluoro modified nucleotide
  modified_base 10: mod_base = OTHER; note = 2'-O-methyl modified nucleotide
  modified_base 11: mod_base = OTHER; note = 2'-fluoro modified nucleotide
  modified_base 12: mod_base = OTHER; note = 2'-O-methyl modified nucleotide
  modified_base 13: mod_base = OTHER; note = 2'-fluoro modified nucleotide
  modified_base 14: mod_base = OTHER; note = 2'-O-methyl modified nucleotide
  modified_base 15: mod_base = OTHER; note = 2'-O-methyl modified nucleotide
  modified_base 16: mod_base = OTHER; note = 2'-O-methyl modified nucleotide
  modified_base 17: mod_base = OTHER; note = 2'-O-methyl modified nucleotide
  modified_base 18: mod_base = OTHER; note = 2'-O-methyl modified nucleotide
  modified_base 19: mod_base = OTHER; note = 2'-O-methyl modified nucleotide
  modified_base 20: mod_base = OTHER; note = 2'-O-methyl modified nucleotide
  modified_base 21: mod_base = OTHER; note = 2'-O-methyl modified nucleotide attached to 3'-3' thiophosphate inverted abasic site
gggacagagttatcaaggcaa

SEQ ID NO: 458 - RNA, 21 nt, synthetic construct
  source 1..21: mol_type = other RNA
  modified_base 1: mod_base = OTHER; note = 2'-O-methyl modified nucleotide attached to 5'-5' thiophosphate inverted abasic site which is attached to O-(1-(1-(((2R,3R,4R,5R,6R)-3-acetamido-4,5-dihydroxy-6-(hyd roxymethyl)tetrahydro-2H-pyran-2-yl)oxy)-9,13-bis(2-((2-(2- (((2R,3R,4R,5R,6R)-3-acetamido-4,5-dihydroxy-6-(hydroxymeth yl)tetrahydro-2H-pyran-2-yl)oxy)ethoxy)ethyl)amino)-2-oxoet hyl)-7,14-dioxo-3-oxa-6,9,13-triazaoctadecan-18-oyl)piperid in-4-yl) O-methyl phosphorothioate via a thiophosphate linkage
  modified_base 2: mod_base = OTHER; note = 2'-O-methyl modified nucleotide
  modified_base 3: mod_base = OTHER; note = 2'-O-methyl modified nucleotide
  modified_base 4: mod_base = OTHER; note = 2'-O-methyl modified nucleotide
  modified_base 5: mod_base = OTHER; note = 2'-O-methyl modified nucleotide
  modified_base 6: mod_base = OTHER; note = 2'-O-methyl modified nucleotide
  modified_base 7: mod_base = OTHER; note = 2'-O-methyl modified nucleotide
  modified_base 8: mod_base = OTHER; note = 2'-O-methyl modified nucleotide
  modified_base 9: mod_base = OTHER; note = 2'-fluoro modified nucleotide
  modified_base 10: mod_base = OTHER; note = 2'-O-methyl modified nucleotide
  modified_base 11: mod_base = OTHER; note = 2'-fluoro modified nucleotide
  modified_base 12: mod_base = OTHER; note = 2'-O-methyl modified nucleotide
  modified_base 13: mod_base = OTHER; note = 2'-fluoro modified nucleotide
  modified_base 14: mod_base = OTHER; note = 2'-O-methyl modified nucleotide
  modified_base 15: mod_base = OTHER; note = 2'-O-methyl modified nucleotide
  modified_base 16: mod_base = OTHER; note = 2'-O-methyl modified nucleotide
  modified_base 17: mod_base = OTHER; note = 2'-O-methyl modified nucleotide
  modified_base 18: mod_base = OTHER; note = 2'-O-methyl modified nucleotide
  modified_base 19: mod_base = OTHER; note = 2'-O-methyl modified nucleotide
  modified_base 20: mod_base = OTHER; note = 2'-O-methyl modified nucleotide
  modified_base 21: mod_base = OTHER; note = 2'-O-methyl modified nucleotide attached to 3'-3' thiophosphate inverted abasic site
gatcaagtgtccttgcaacta

SEQ ID NO: 459 - RNA, 21 nt, synthetic construct
  source 1..21: mol_type = other RNA
  modified_base 1: mod_base = OTHER; note = 2'-O-methyl modified nucleotide attached to 5'-5' thiophosphate inverted abasic site which is attached to O-(1-(1-(((2R,3R,4R,5R,6R)-3-acetamido-4,5-dihydroxy-6-(hyd roxymethyl)tetrahydro-2H-pyran-2-yl)oxy)-9,13-bis(2-((2-(2- (((2R,3R,4R,5R,6R)-3-acetamido-4,5-dihydroxy-6-(hydroxymeth yl)tetrahydro-2H-pyran-2-yl)oxy)ethoxy)ethyl)amino)-2-oxoet hyl)-7,14-dioxo-3-oxa-6,9,13-triazaoctadecan-18-oyl)piperid in-4-yl) O-methyl phosphorothioate via a thiophosphate linkage
  modified_base 2: mod_base = OTHER; note = 2'-O-methyl modified nucleotide
  modified_base 3: mod_base = OTHER; note = 2'-O-methyl modified nucleotide
  modified_base 4: mod_base = OTHER; note = 2'-O-methyl modified nucleotide
  modified_base 5: mod_base = OTHER; note = 2'-O-methyl modified nucleotide
  modified_base 6: mod_base = OTHER; note = 2'-O-methyl modified nucleotide
  modified_base 7: mod_base = OTHER; note = 2'-O-methyl modified nucleotide
  modified_base 8: mod_base = OTHER; note = 2'-O-methyl modified nucleotide
  modified_base 9: mod_base = OTHER; note = 2'-fluoro modified nucleotide
  modified_base 10: mod_base = OTHER; note = 2'-O-methyl modified nucleotide
  modified_base 11: mod_base = OTHER; note = 2'-fluoro modified nucleotide
  modified_base 12: mod_base = OTHER; note = 2'-O-methyl modified nucleotide
  modified_base 13: mod_base = OTHER; note = 2'-fluoro modified nucleotide
  modified_base 14: mod_base = OTHER; note = 2'-O-methyl modified nucleotide
  modified_base 15: mod_base = OTHER; note = 2'-O-methyl modified nucleotide
  modified_base 16: mod_base = OTHER; note = 2'-O-methyl modified nucleotide
  modified_base 17: mod_base = OTHER; note = 2'-O-methyl modified nucleotide
  modified_base 18: mod_base = OTHER; note = 2'-O-methyl modified nucleotide
  modified_base 19: mod_base = OTHER; note = 2'-O-methyl modified nucleotide
  modified_base 20: mod_base = OTHER; note = 2'-O-methyl modified nucleotide
  modified_base 21: mod_base = OTHER; note = 2'-O-methyl modified nucleotide attached to 3'-3' thiophosphate inverted abasic site
cgggtccaggattgctaccaa

SEQ ID NO: 460 - RNA, 21 nt, synthetic construct
  source 1..21: mol_type = other RNA
  modified_base 1: mod_base = OTHER; note = 2'-O-methyl modified nucleotide attached to 5'-5' thiophosphate inverted abasic site which is attached to O-(1-(1-(((2R,3R,4R,5R,6R)-3-acetamido-4,5-dihydroxy-6-(hyd roxymethyl)tetrahydro-2H-pyran-2-yl)oxy)-9,13-bis(2-((2-(2- (((2R,3R,4R,5R,6R)-3-acetamido-4,5-dihydroxy-6-(hydroxymeth yl)tetrahydro-2H-pyran-2-yl)oxy)ethoxy)ethyl)amino)-2-oxoet hyl)-7,14-dioxo-3-oxa-6,9,13-triazaoctadecan-18-oyl)piperid in-4-yl) O-methyl phosphorothioate via a thiophosphate linkage
  modified_base 2: mod_base = OTHER; note = 2'-O-methyl modified nucleotide
  modified_base 3: mod_base = OTHER; note = 2'-O-methyl modified nucleotide
  modified_base 4: mod_base = OTHER; note = 2'-O-methyl modified nucleotide
  modified_base 5: mod_base = OTHER; note = 2'-O-methyl modified nucleotide
  modified_base 6: mod_base = OTHER; note = 2'-O-methyl modified nucleotide
  modified_base 7: mod_base = OTHER; note = 2'-O-methyl modified nucleotide
  modified_base 8: mod_base = OTHER; note = 2'-O-methyl modified nucleotide
  modified_base 9: mod_base = OTHER; note = 2'-fluoro modified nucleotide
  modified_base 10: mod_base = OTHER; note = 2'-O-methyl modified nucleotide
  modified_base 11: mod_base = OTHER; note = 2'-fluoro modified nucleotide
  modified_base 12: mod_base = OTHER; note = 2'-O-methyl modified nucleotide
  modified_base 13: mod_base = OTHER; note = 2'-fluoro modified nucleotide
  modified_base 14: mod_base = OTHER; note = 2'-O-methyl modified nucleotide
  modified_base 15: mod_base = OTHER; note = 2'-O-methyl modified nucleotide
  modified_base 16: mod_base = OTHER; note = 2'-O-methyl modified nucleotide
  modified_base 17: mod_base = OTHER; note = 2'-O-methyl modified nucleotide
  modified_base 18: mod_base = OTHER; note = 2'-O-methyl modified nucleotide
  modified_base 19: mod_base = OTHER; note = 2'-O-methyl modified nucleotide
  modified_base 20: mod_base = OTHER; note = 2'-O-methyl modified nucleotide
  modified_base 21: mod_base = OTHER; note = 2'-O-methyl modified nucleotide attached to 3'-3' thiophosphate inverted abasic site
gtgtcacaggaaggacatgta

SEQ ID NO: 461 - RNA, 21 nt, synthetic construct
  source 1..21: mol_type = other RNA
  modified_base 1: mod_base = OTHER; note = 2'-O-methyl modified nucleotide attached to 5'-5' thiophosphate inverted abasic site which is attached to O-(1-(1-(((2R,3R,4R,5R,6R)-3-acetamido-4,5-dihydroxy-6-(hyd roxymethyl)tetrahydro-2H-pyran-2-yl)oxy)-9,13-bis(2-((2-(2- (((2R,3R,4R,5R,6R)-3-acetamido-4,5-dihydroxy-6-(hydroxymeth yl)tetrahydro-2H-pyran-2-yl)oxy)ethoxy)ethyl)amino)-2-oxoet hyl)-7,14-dioxo-3-oxa-6,9,13-triazaoctadecan-18-oyl)piperid in-4-yl) O-methyl phosphorothioate via a thiophosphate linkage
  modified_base 2: mod_base = OTHER; note = 2'-O-methyl modified nucleotide
  modified_base 3: mod_base = OTHER; note = 2'-O-methyl modified nucleotide
  modified_base 4: mod_base = OTHER; note = 2'-O-methyl modified nucleotide
  modified_base 5: mod_base = OTHER; note = 2'-O-methyl modified nucleotide
  modified_base 6: mod_base = OTHER; note = 2'-O-methyl modified nucleotide
  modified_base 7: mod_base = OTHER; note = 2'-O-methyl modified nucleotide
  modified_base 8: mod_base = OTHER; note = 2'-O-methyl modified nucleotide
  modified_base 9: mod_base = OTHER; note = 2'-fluoro modified nucleotide
  modified_base 10: mod_base = OTHER; note = 2'-O-methyl modified nucleotide
  modified_base 11: mod_base = OTHER; note = 2'-fluoro modified nucleotide
  modified_base 12: mod_base = OTHER; note = 2'-O-methyl modified nucleotide
  modified_base 13: mod_base = OTHER; note = 2'-fluoro modified nucleotide
  modified_base 14: mod_base = OTHER; note = 2'-O-methyl modified nucleotide
  modified_base 15: mod_base = OTHER; note = 2'-O-methyl modified nucleotide
  modified_base 16: mod_base = OTHER; note = 2'-O-methyl modified nucleotide
  modified_base 17: mod_base = OTHER; note = 2'-O-methyl modified nucleotide
  modified_base 18: mod_base = OTHER; note = 2'-O-methyl modified nucleotide
  modified_base 19: mod_base = OTHER; note = 2'-O-methyl modified nucleotide
  modified_base 20: mod_base = OTHER; note = 2'-O-methyl modified nucleotide
  modified_base 21: mod_base = OTHER; note = 2'-O-methyl modified nucleotide attached to 3'-3' thiophosphate inverted abasic site
gatgtccagtgacagaatcaa

SEQ ID NO: 462 - RNA, 21 nt, synthetic construct
  source 1..21: mol_type = other RNA
  modified_base 1: mod_base = OTHER; note = 2'-O-methyl modified nucleotide attached to 5'-5' thiophosphate inverted abasic site which is attached to O-(1-(1-(((2R,3R,4R,5R,6R)-3-acetamido-4,5-dihydroxy-6-(hyd roxymethyl)tetrahydro-2H-pyran-2-yl)oxy)-9,13-bis(2-((2-(2- (((2R,3R,4R,5R,6R)-3-acetamido-4,5-dihydroxy-6-(hydroxymeth yl)tetrahydro-2H-pyran-2-yl)oxy)ethoxy)ethyl)amino)-2-oxoet hyl)-7,14-dioxo-3-oxa-6,9,13-triazaoctadecan-18-oyl)piperid in-4-yl) O-methyl phosphorothioate via a thiophosphate linkage
  modified_base 2: mod_base = OTHER; note = 2'-O-methyl modified nucleotide
  modified_base 3: mod_base = OTHER; note = 2'-O-methyl modified nucleotide
  modified_base 4: mod_base = OTHER; note = 2'-O-methyl modified nucleotide
  modified_base 5: mod_base = OTHER; note = 2'-O-methyl modified nucleotide
  modified_base 6: mod_base = OTHER; note = 2'-O-methyl modified nucleotide
  modified_base 7: mod_base = OTHER; note = 2'-O-methyl modified nucleotide
  modified_base 8: mod_base = OTHER; note = 2'-O-methyl modified nucleotide
  modified_base 9: mod_base = OTHER; note = 2'-fluoro modified nucleotide
  modified_base 10: mod_base = OTHER; note = 2'-O-methyl modified nucleotide
  modified_base 11: mod_base = OTHER; note = 2'-fluoro modified nucleotide
  modified_base 12: mod_base = OTHER; note = 2'-O-methyl modified nucleotide
  modified_base 13: mod_base = OTHER; note = 2'-fluoro modified nucleotide
  modified_base 14: mod_base = OTHER; note = 2'-O-methyl modified nucleotide
  modified_base 15: mod_base = OTHER; note = 2'-O-methyl modified nucleotide
  modified_base 16: mod_base = OTHER; note = 2'-O-methyl modified nucleotide
  modified_base 17: mod_base = OTHER; note = 2'-O-methyl modified nucleotide
  modified_base 18: mod_base = OTHER; note = 2'-O-methyl modified nucleotide
  modified_base 19: mod_base = OTHER; note = 2'-O-methyl modified nucleotide
  modified_base 20: mod_base = OTHER; note = 2'-O-methyl modified nucleotide
  modified_base 21: mod_base = OTHER; note = 2'-O-methyl modified nucleotide attached to 3'-3' thiophosphate inverted abasic site
gcagaggctccttctgaacaa

SEQ ID NO: 463 - RNA, 21 nt, synthetic construct
  source 1..21: mol_type = other RNA
  modified_base 1: mod_base = OTHER; note = 2'-O-methyl modified nucleotide attached to 5'-5' thiophosphate inverted abasic site which is attached to O-(1-(1-(((2R,3R,4R,5R,6R)-3-acetamido-4,5-dihydroxy-6-(hyd roxymethyl)tetrahydro-2H-pyran-2-yl)oxy)-9,13-bis(2-((2-(2- (((2R,3R,4R,5R,6R)-3-acetamido-4,5-dihydroxy-6-(hydroxymeth yl)tetrahydro-2H-pyran-2-yl)oxy)ethoxy)ethyl)amino)-2-oxoet hyl)-7,14-dioxo-3-oxa-6,9,13-triazaoctadecan-18-oyl)piperid in-4-yl) O-methyl phosphorothioate via a thiophosphate linkage
  modified_base 2: mod_base = OTHER; note = 2'-O-methyl modified nucleotide
  modified_base 3: mod_base = OTHER; note = 2'-O-methyl modified nucleotide
  modified_base 4: mod_base = OTHER; note = 2'-O-methyl modified nucleotide
  modified_base 5: mod_base = OTHER; note = 2'-O-methyl modified nucleotide
  modified_base 6: mod_base = OTHER; note = 2'-O-methyl modified nucleotide
  modified_base 7: mod_base = OTHER; note = 2'-O-methyl modified nucleotide
  modified_base 8: mod_base = OTHER; note = 2'-O-methyl modified nucleotide
  modified_base 9: mod_base = OTHER; note = 2'-fluoro modified nucleotide
  modified_base 10: mod_base = OTHER; note = 2'-O-methyl modified nucleotide
  modified_base 11: mod_base = OTHER; note = 2'-fluoro modified nucleotide
  modified_base 12: mod_base = OTHER; note = 2'-O-methyl modified nucleotide
  modified_base 13: mod_base = OTHER; note = 2'-fluoro modified nucleotide
  modified_base 14: mod_base = OTHER; note = 2'-O-methyl modified nucleotide
  modified_base 15: mod_base = OTHER; note = 2'-O-methyl modified nucleotide
  modified_base 16: mod_base = OTHER; note = 2'-O-methyl modified nucleotide
  modified_base 17: mod_base = OTHER; note = 2'-O-methyl modified nucleotide
  modified_base 18: mod_base = OTHER; note = 2'-O-methyl modified nucleotide
  modified_base 19: mod_base = OTHER; note = 2'-O-methyl modified nucleotide
  modified_base 20: mod_base = OTHER; note = 2'-O-methyl modified nucleotide
  modified_base 21: mod_base = OTHER; note = 2'-O-methyl modified nucleotide attached to 3'-3' thiophosphate inverted abasic site
catggacagagttatcgagga

SEQ ID NO: 464 - RNA, 21 nt, synthetic construct
  source 1..21: mol_type = other RNA
  modified_base 1: mod_base = OTHER; note = 2'-O-methyl modified nucleotide attached to 5'-5' thiophosphate inverted abasic site which is attached to O-(1-(1-(((2R,3R,4R,5R,6R)-3-acetamido-4,5-dihydroxy-6-(hyd roxymethyl)tetrahydro-2H-pyran-2-yl)oxy)-9,13-bis(2-((2-(2- (((2R,3R,4R,5R,6R)-3-acetamido-4,5-dihydroxy-6-(hydroxymeth yl)tetrahydro-2H-pyran-2-yl)oxy)ethoxy)ethyl)amino)-2-oxoet hyl)-7,14-dioxo-3-oxa-6,9,13-triazaoctadecan-18-oyl)piperid in-4-yl) O-methyl phosphorothioate via a thiophosphate linkage
  modified_base 2: mod_base = OTHER; note = 2'-O-methyl modified nucleotide
  modified_base 3: mod_base = OTHER; note = 2'-O-methyl modified nucleotide
  modified_base 4: mod_base = OTHER; note = 2'-O-methyl modified nucleotide
  modified_base 5: mod_base = OTHER; note = 2'-O-methyl modified nucleotide
  modified_base 6: mod_base = OTHER; note = 2'-O-methyl modified nucleotide
  modified_base 7: mod_base = OTHER; note = 2'-O-methyl modified nucleotide
  modified_base 8: mod_base = OTHER; note = 2'-O-methyl modified nucleotide
  modified_base 9: mod_base = OTHER; note = 2'-fluoro modified nucleotide
  modified_base 10: mod_base = OTHER; note = 2'-O-methyl modified nucleotide
  modified_base 11: mod_base = OTHER; note = 2'-fluoro modified nucleotide
  modified_base 12: mod_base = OTHER; note = 2'-O-methyl modified nucleotide
  modified_base 13: mod_base = OTHER; note = 2'-fluoro modified nucleotide
  modified_base 14: mod_base = OTHER; note = 2'-O-methyl modified nucleotide
  modified_base 15: mod_base = OTHER; note = 2'-O-methyl modified nucleotide
  modified_base 16: mod_base = OTHER; note = 2'-O-methyl modified nucleotide
  modified_base 17: mod_base = OTHER; note = 2'-O-methyl modified nucleotide
  modified_base 18: mod_base = OTHER; note = 2'-O-methyl modified nucleotide
  modified_base 19: mod_base = OTHER; note = 2'-O-methyl modified nucleotide
  modified_base 20: mod_base = OTHER; note = 2'-O-methyl modified nucleotide
  modified_base 21: mod_base = OTHER; note = 2'-O-methyl modified nucleotide attached to 3'-3' thiophosphate inverted abasic site
gaccatggtaatggacagaga

SEQ ID NO: 465 - RNA, 21 nt, synthetic construct
  source 1..21: mol_type = other RNA
  modified_base 1: mod_base = OTHER; note = 2'-O-methyl modified nucleotide attached to 5'-5' thiophosphate inverted abasic site which is attached to O-(1-(1-(((2R,3R,4R,5R,6R)-3-acetamido-4,5-dihydroxy-6-(hyd roxymethyl)tetrahydro-2H-pyran-2-yl)oxy)-9,13-bis(2-((2-(2- (((2R,3R,4R,5R,6R)-3-acetamido-4,5-dihydroxy-6-(hydroxymeth yl)tetrahydro-2H-pyran-2-yl)oxy)ethoxy)ethyl)amino)-2-oxoet hyl)-7,14-dioxo-3-oxa-6,9,13-triazaoctadecan-18-oyl)piperid in-4-yl) O-methyl phosphorothioate via a thiophosphate linkage
  modified_base 2: mod_base = OTHER; note = 2'-O-methyl modified nucleotide
  modified_base 3: mod_base = OTHER; note = 2'-O-methyl modified nucleotide
  modified_base 4: mod_base = OTHER; note = 2'-O-methyl modified nucleotide
  modified_base 5: mod_base = OTHER; note = 2'-O-methyl modified nucleotide
  modified_base 6: mod_base = OTHER; note = 2'-O-methyl modified nucleotide
  modified_base 7: mod_base = OTHER; note = 2'-O-methyl modified nucleotide
  modified_base 8: mod_base = OTHER; note = 2'-O-methyl modified nucleotide
  modified_base 9: mod_base = OTHER; note = 2'-fluoro modified nucleotide
  modified_base 10: mod_base = OTHER; note = 2'-O-methyl modified nucleotide
  modified_base 11: mod_base = OTHER; note = 2'-fluoro modified nucleotide
  modified_base 12: mod_base = OTHER; note = 2'-O-methyl modified nucleotide
  modified_base 13: mod_base = OTHER; note = 2'-fluoro modified nucleotide
  modified_base 14: mod_base = OTHER; note = 2'-O-methyl modified nucleotide
  modified_base 15: mod_base = OTHER; note = 2'-O-methyl modified nucleotide
  modified_base 16: mod_base = OTHER; note = 2'-O-methyl modified nucleotide
  modified_base 17: mod_base = OTHER; note = 2'-O-methyl modified nucleotide
  modified_base 18: mod_base = OTHER; note = 2'-O-methyl modified nucleotide
  modified_base 19: mod_base = OTHER; note = 2'-O-methyl modified nucleotide
  modified_base 20: mod_base = OTHER; note = 2'-O-methyl modified nucleotide
  modified_base 21: mod_base = OTHER; note = 2'-O-methyl modified nucleotide attached to 3'-3' thiophosphate inverted abasic site
gggacagagttatcaaggcaa

SEQ ID NO: 466 - RNA, 21 nt, synthetic construct
  source 1..21: mol_type = other RNA
  modified_base 1: mod_base = OTHER; note = 2'-O-methyl modified nucleotide attached to 5'-5' thiophosphate inverted abasic site which is attached to O-(1-(1-(((2R,3R,4R,5R,6R)-3-acetamido-4,5-dihydroxy-6-(hyd roxymethyl)tetrahydro-2H-pyran-2-yl)oxy)-9,13-bis(2-((2-(2- (((2R,3R,4R,5R,6R)-3-acetamido-4,5-dihydroxy-6-(hydroxymeth yl)tetrahydro-2H-pyran-2-yl)oxy)ethoxy)ethyl)amino)-2-oxoet hyl)-7,14-dioxo-3-oxa-6,9,13-triazaoctadecan-18-oyl)piperid in-4-yl) O-methyl phosphorothioate via a thiophosphate linkage
  modified_base 2: mod_base = OTHER; note = 2'-O-methyl modified nucleotide
  modified_base 3: mod_base = OTHER; note = 2'-O-methyl modified nucleotide
  modified_base 4: mod_base = OTHER; note = 2'-O-methyl modified nucleotide
  modified_base 5: mod_base = OTHER; note = 2'-O-methyl modified nucleotide
  modified_base 6: mod_base = OTHER; note = 2'-O-methyl modified nucleotide
  modified_base 7: mod_base = OTHER; note = 2'-O-methyl modified nucleotide
  modified_base 8: mod_base = OTHER; note = 2'-O-methyl modified nucleotide
  modified_base 9: mod_base = OTHER; note = 2'-fluoro modified nucleotide
  modified_base 10: mod_base = OTHER; note = 2'-O-methyl modified nucleotide
  modified_base 11: mod_base = OTHER; note = 2'-fluoro modified nucleotide
  modified_base 12: mod_base = OTHER; note = 2'-O-methyl modified nucleotide
  modified_base 13: mod_base = OTHER; note = 2'-fluoro modified nucleotide
  modified_base 14: mod_base = OTHER; note = 2'-O-methyl modified nucleotide
  modified_base 15: mod_base = OTHER; note = 2'-O-methyl modified nucleotide
  modified_base 16: mod_base = OTHER; note = 2'-O-methyl modified nucleotide
  modified_base 17: mod_base = OTHER; note = 2'-O-methyl modified nucleotide
  modified_base 18: mod_base = OTHER; note = 2'-O-methyl modified nucleotide
  modified_base 19: mod_base = OTHER; note = 2'-O-methyl modified nucleotide
  modified_base 20: mod_base = OTHER; note = 2'-O-methyl modified nucleotide
  modified_base 21: mod_base = OTHER; note = 2'-O-methyl modified nucleotide attached to 3'-3' thiophosphate inverted abasic site
cgggtccaggattgctaccaa

SEQ ID NO: 467 - RNA, 21 nt, synthetic construct
  source 1..21: mol_type = other RNA
  modified_base 1: mod_base = OTHER; note = 2'-O-methyl modified nucleotide attached to 5'-5' thiophosphate inverted abasic site which is attached to O-(1-(1-(((2R,3R,4R,5R,6R)-3-acetamido-4,5-dihydroxy-6-(hyd roxymethyl)tetrahydro-2H-pyran-2-yl)oxy)-9,13-bis(2-((2-(2- (((2R,3R,4R,5R,6R)-3-acetamido-4,5-dihydroxy-6-(hydroxymeth yl)tetrahydro-2H-pyran-2-yl)oxy)ethoxy)ethyl)amino)-2-oxoet hyl)-7,14-dioxo-3-oxa-6,9,13-triazaoctadecan-18-oyl)piperid in-4-yl) O-methyl phosphorothioate via a thiophosphate linkage
  modified_base 2: mod_base = OTHER; note = 2'-O-methyl modified nucleotide
  modified_base 3: mod_base = OTHER; note = 2'-O-methyl modified nucleotide
  modified_base 4: mod_base = OTHER; note = 2'-O-methyl modified nucleotide
  modified_base 5: mod_base = OTHER; note = 2'-O-methyl modified nucleotide
  modified_base 6: mod_base = OTHER; note = 2'-O-methyl modified nucleotide
  modified_base 7: mod_base = OTHER; note = 2'-O-methyl modified nucleotide
  modified_base 8: mod_base = OTHER; note = 2'-O-methyl modified nucleotide
  modified_base 9: mod_base = OTHER; note = 2'-fluoro modified nucleotide
  modified_base 10: mod_base = OTHER; note = 2'-O-methyl modified nucleotide
  modified_base 11: mod_base = OTHER; note = 2'-fluoro modified nucleotide
  modified_base 12: mod_base = OTHER; note = 2'-O-methyl modified nucleotide
  modified_base 13: mod_base = OTHER; note = 2'-fluoro modified nucleotide
  modified_base 14: mod_base = OTHER; note = 2'-O-methyl modified nucleotide
  modified_base 15: mod_base = OTHER; note = 2'-O-methyl modified nucleotide
  modified_base 16: mod_base = OTHER; note = 2'-O-methyl modified nucleotide
  modified_base 17: mod_base = OTHER; note = 2'-O-methyl modified nucleotide
  modified_base 18: mod_base = OTHER; note = 2'-O-methyl modified nucleotide
  modified_base 19: mod_base = OTHER; note = 2'-O-methyl modified nucleotide
  modified_base 20: mod_base = OTHER; note = 2'-O-methyl modified nucleotide
  modified_base 21: mod_base = OTHER; note = 2'-O-methyl modified nucleotide attached to 3'-3' thiophosphate inverted abasic site
gttgccaagcttggtcatcta

SEQ ID NO: 468 - RNA, 21 nt, synthetic construct
  source 1..21: mol_type = other RNA
  modified_base 1: mod_base = OTHER; note = 2'-O-methyl modified nucleotide attached to 5'-5' thiophosphate inverted abasic site which is attached to O-(1-(1-(((2R,3R,4R,5R,6R)-3-acetamido-4,5-dihydroxy-6-(hyd roxymethyl)tetrahydro-2H-pyran-2-yl)oxy)-9,13-bis(2-((2-(2- (((2R,3R,4R,5R,6R)-3-acetamido-4,5-dihydroxy-6-(hydroxymeth yl)tetrahydro-2H-pyran-2-yl)oxy)ethoxy)ethyl)amino)-2-oxoet hyl)-7,14-dioxo-3-oxa-6,9,13-triazaoctadecan-18-oyl)piperid in-4-yl) O-methyl phosphorothioate via a thiophosphate linkage
  modified_base 2: mod_base = OTHER; note = 2'-O-methyl modified nucleotide
  modified_base 3: mod_base = OTHER; note = 2'-O-methyl modified nucleotide
  modified_base 4: mod_base = OTHER; note = 2'-O-methyl modified nucleotide
  modified_base 5: mod_base = OTHER; note = 2'-O-methyl modified nucleotide
  modified_base 6: mod_base = OTHER; note = 2'-O-methyl modified nucleotide
  modified_base 7: mod_base = OTHER; note = 2'-O-methyl modified nucleotide
  modified_base 8: mod_base = OTHER; note = 2'-O-methyl modified nucleotide
  modified_base 9: mod_base = OTHER; note = 2'-fluoro modified nucleotide
  modified_base 10: mod_base = OTHER; note = 2'-O-methyl modified nucleotide
  modified_base 11: mod_base = OTHER; note = 2'-fluoro modified nucleotide
  modified_base 12: mod_base = OTHER; note = 2'-O-methyl modified nucleotide
  modified_base 13: mod_base = OTHER; note = 2'-fluoro modified nucleotide
  modified_base 14: mod_base = OTHER; note = 2'-O-methyl modified nucleotide
  modified_base 15: mod_base = OTHER; note = 2'-O-methyl modified nucleotide
  modified_base 16: mod_base = OTHER; note = 2'-O-methyl modified nucleotide
  modified_base 17: mod_base = OTHER; note = 2'-O-methyl modified nucleotide
  modified_base 18: mod_base = OTHER; note = 2'-O-methyl modified nucleotide
  modified_base 19: mod_base = OTHER; note = 2'-O-methyl modified nucleotide
  modified_base 20: mod_base = OTHER; note = 2'-O-methyl modified nucleotide
  modified_base 21: mod_base = OTHER; note = 2'-O-methyl modified nucleotide attached to 3'-3' thiophosphate inverted abasic site
gggaaatggacagagttatca

SEQ ID NO: 469 - RNA, 21 nt, synthetic construct
  source 1..21: mol_type = other RNA
  modified_base 1: mod_base = OTHER; note = 2'-O-methyl modified nucleotide with thiophosphate linkage
  modified_base 2: mod_base = OTHER; note = 2'-fluoro modified nucleotide with thiophosphate linkage
  modified_base 3: mod_base = OTHER; note = 2'-O-methyl modified nucleotide
  modified_base 4: mod_base = OTHER; note = 2'-O-methyl modified nucleotide
  modified_base 5: mod_base = OTHER; note = 2'-O-methyl modified nucleotide
  modified_base 6: mod_base = OTHER; note = 2'-O-methyl modified nucleotide
  modified_base 7: mod_base = OTHER; note = 2'-fluoro modified nucleotide
  modified_base 8: mod_base = OTHER; note = 2'-O-methyl modified nucleotide
  modified_base 9: mod_base = OTHER; note = 2'-O-methyl modified nucleotide
  modified_base 10: mod_base = OTHER; note = 2'-O-methyl modified nucleotide
  modified_base 11: mod_base = OTHER; note = 2'-O-methyl modified nucleotide
  modified_base 12: mod_base = OTHER; note = 2'-fluoro modified nucleotide
  modified_base 13: mod_base = OTHER; note = 2'-O-methyl modified nucleotide
  modified_base 14: mod_base = OTHER; note = 2'-fluoro modified nucleotide
  modified_base 15: mod_base = OTHER; note = 2'-O-methyl modified nucleotide
  modified_base 16: mod_base = OTHER; note = 2'-fluoro modified nucleotide
  modified_base 17: mod_base = OTHER; note = 2'-O-methyl modified nucleotide
  modified_base 18: mod_base = OTHER; note = 2'-O-methyl modified nucleotide
  modified_base 19: mod_base = OTHER; note = 2'-O-methyl modified nucleotide with thiophosphate linkage
  modified_base 20: mod_base = OTHER; note = 2'-O-methyl modified nucleotide with thiophosphate linkage
  modified_base 21: mod_base = OTHER; note = 2'-O-methyl modified nucleotide
tcgtataacaataaggggctg

SEQ ID NO: 470 - RNA, 21 nt, synthetic construct
  source 1..21: mol_type = other RNA
  modified_base 1: mod_base = OTHER; note = 2'-O-methyl modified nucleotide with thiophosphate linkage
  modified_base 2: mod_base = OTHER; note = 2'-fluoro modified nucleotide with thiophosphate linkage
  modified_base 3: mod_base = OTHER; note = 2'-O-methyl modified nucleotide
  modified_base 4: mod_base = OTHER; note = 2'-O-methyl modified nucleotide
  modified_base 5: mod_base = OTHER; note = 2'-O-methyl modified nucleotide
  modified_base 6: mod_base = OTHER; note = 2'-O-methyl modified nucleotide
  modified_base 7: mod_base = OTHER; note = 2'-fluoro modified nucleotide
  modified_base 8: mod_base = OTHER; note = 2'-O-methyl modified nucleotide
  modified_base 9: mod_base = OTHER; note = 2'-O-methyl modified nucleotide
  modified_base 10: mod_base = OTHER; note = 2'-O-methyl modified nucleotide
  modified_base 11: mod_base = OTHER; note = 2'-O-methyl modified nucleotide
  modified_base 12: mod_base = OTHER; note = 2'-fluoro modified nucleotide
  modified_base 13: mod_base = OTHER; note = 2'-O-methyl modified nucleotide
  modified_base 14: mod_base = OTHER; note = 2'-fluoro modified nucleotide
  modified_base 15: mod_base = OTHER; note = 2'-O-methyl modified nucleotide
  modified_base 16: mod_base = OTHER; note = 2'-fluoro modified nucleotide
  modified_base 17: mod_base = OTHER; note = 2'-O-methyl modified nucleotide
  modified_base 18: mod_base = OTHER; note = 2'-O-methyl modified nucleotide
  modified_base 19: mod_base = OTHER; note = 2'-O-methyl modified nucleotide with thiophosphate linkage
  modified_base 20: mod_base = OTHER; note = 2'-O-methyl modified nucleotide with thiophosphate linkage
  modified_base 21: mod_base = OTHER; note = 2'-O-methyl modified nucleotide
tgagaatgagcctcgataact

SEQ ID NO: 471 - RNA, 21 nt, synthetic construct
  source 1..21: mol_type = other RNA
  modified_base 1: mod_base = OTHER; note = 2'-O-methyl modified nucleotide with thiophosphate linkage
  modified_base 2: mod_base = OTHER; note = 2'-fluoro modified nucleotide with thiophosphate linkage
  modified_base 3: mod_base = OTHER; note = 2'-O-methyl modified nucleotide
  modified_base 4: mod_base = OTHER; note = 2'-O-methyl modified nucleotide
  modified_base 5: mod_base = OTHER; note = 2'-O-methyl modified nucleotide
  modified_base 6: mod_base = OTHER; note = 2'-O-methyl modified nucleotide
  modified_base 7: mod_base = OTHER; note = 2'-fluoro modified nucleotide
  modified_base 8: mod_base = OTHER; note = 2'-O-methyl modified nucleotide
  modified_base 9: mod_base = OTHER; note = 2'-O-methyl modified nucleotide
  modified_base 10: mod_base = OTHER; note = 2'-O-methyl modified nucleotide
  modified_base 11: mod_base = OTHER; note = 2'-O-methyl modified nucleotide
  modified_base 12: mod_base = OTHER; note = 2'-fluoro modified nucleotide
  modified_base 13: mod_base = OTHER; note = 2'-O-methyl modified nucleotide
  modified_base 14: mod_base = OTHER; note = 2'-fluoro modified nucleotide
  modified_base 15: mod_base = OTHER; note = 2'-O-methyl modified nucleotide
  modified_base 16: mod_base = OTHER; note = 2'-fluoro modified nucleotide
  modified_base 17: mod_base = OTHER; note = 2'-O-methyl modified nucleotide
  modified_base 18: mod_base = OTHER; note = 2'-O-methyl modified nucleotide
  modified_base 19: mod_base = OTHER; note = 2'-O-methyl modified nucleotide with thiophosphate linkage
  modified_base 20: mod_base = OTHER; note = 2'-O-methyl modified nucleotide with thiophosphate linkage
  modified_base 21: mod_base = OTHER; note = 2'-O-methyl modified nucleotide
ttgcgtctgagcattgtgtca

SEQ ID NO: 472 - RNA, 21 nt, synthetic construct
  source 1..21: mol_type = other RNA
  modified_base 1: mod_base = OTHER; note = 2'-O-methyl modified nucleotide with thiophosphate linkage
  modified_base 2: mod_base = OTHER; note = 2'-fluoro modified nucleotide with thiophosphate linkage
  modified_base 3: mod_base = OTHER; note = 2'-O-methyl modified nucleotide
  modified_base 4: mod_base = OTHER; note = 2'-O-methyl modified nucleotide
  modified_base 5: mod_base = OTHER; note = 2'-O-methyl modified nucleotide
  modified_base 6: mod_base = OTHER; note = 2'-O-methyl modified nucleotide
  modified_base 7: mod_base = OTHER; note = 2'-fluoro modified nucleotide
  modified_base 8: mod_base = OTHER; note = 2'-O-methyl modified nucleotide
  modified_base 9: mod_base = OTHER; note = 2'-O-methyl modified nucleotide
  modified_base 10: mod_base = OTHER; note = 2'-O-methyl modified nucleotide
  modified_base 11: mod_base = OTHER; note = 2'-O-methyl modified nucleotide
  modified_base 12: mod_base = OTHER; note = 2'-fluoro modified nucleotide
  modified_base 13: mod_base = OTHER; note = 2'-O-methyl modified nucleotide
  modified_base 14: mod_base = OTHER; note = 2'-fluoro modified nucleotide
  modified_base 15: mod_base = OTHER; note = 2'-O-methyl modified nucleotide
  modified_base 16: mod_base = OTHER; note = 2'-fluoro modified nucleotide
  modified_base 17: mod_base = OTHER; note = 2'-O-methyl modified nucleotide
  modified_base 18: mod_base = OTHER; note = 2'-O-methyl modified nucleotide
  modified_base 19: mod_base = OTHER; note = 2'-O-methyl modified nucleotide with thiophosphate linkage
  modified_base 20: mod_base = OTHER; note = 2'-O-methyl modified nucleotide with thiophosphate linkage
  modified_base 21: mod_base = OTHER; note = 2'-O-methyl modified nucleotide
tatcaagccagcatttgggtc

SEQ ID NO: 473 - RNA, 21 nt, synthetic construct
  source 1..21: mol_type = other RNA
  modified_base 1: mod_base = OTHER; note = 2'-O-methyl modified nucleotide with thiophosphate linkage
  modified_base 2: mod_base = OTHER; note = 2'-fluoro modified nucleotide with thiophosphate linkage
  modified_base 3: mod_base = OTHER; note = 2'-O-methyl modified nucleotide
  modified_base 4: mod_base = OTHER; note = 2'-O-methyl modified nucleotide
  modified_base 5: mod_base = OTHER; note = 2'-O-methyl modified nucleotide
  modified_base 6: mod_base = OTHER; note = 2'-O-methyl modified nucleotide
  modified_base 7: mod_base = OTHER; note = 2'-fluoro modified nucleotide
  modified_base 8: mod_base = OTHER; note = 2'-O-methyl modified nucleotide
  modified_base 9: mod_base = OTHER; note = 2'-O-methyl modified nucleotide
  modified_base 10: mod_base = OTHER; note = 2'-O-methyl modified nucleotide
  modified_base 11: mod_base = OTHER; note = 2'-O-methyl modified nucleotide
  modified_base 12: mod_base = OTHER; note = 2'-fluoro modified nucleotide
  modified_base 13: mod_base = OTHER; note = 2'-O-methyl modified nucleotide
  modified_base 14: mod_base = OTHER; note = 2'-fluoro modified nucleotide
  modified_base 15: mod_base = OTHER; note = 2'-O-methyl modified nucleotide
  modified_base 16: mod_base = OTHER; note = 2'-fluoro modified nucleotide
  modified_base 17: mod_base = OTHER; note = 2'-O-methyl modified nucleotide
  modified_base 18: mod_base = OTHER; note = 2'-O-methyl modified nucleotide
  modified_base 19: mod_base = OTHER; note = 2'-O-methyl modified nucleotide with thiophosphate linkage
  modified_base 20: mod_base = OTHER; note = 2'-O-methyl modified nucleotide with thiophosphate linkage
  modified_base 21: mod_base = OTHER; note = 2'-O-methyl modified nucleotide
tgataactctgtccattaccc

SEQ ID NO: 474 - RNA, 21 nt, synthetic construct
  source 1..21: mol_type = other RNA
  modified_base 1: mod_base = OTHER; note = 2'-O-methyl modified nucleotide with thiophosphate linkage
  modified_base 2: mod_base = OTHER; note = 2'-fluoro modified nucleotide with thiophosphate linkage
  modified_base 3: mod_base = OTHER; note = 2'-O-methyl modified nucleotide
  modified_base 4: mod_base = OTHER; note = 2'-O-methyl modified nucleotide
  modified_base 5: mod_base = OTHER; note = 2'-O-methyl modified nucleotide
  modified_base 6: mod_base = OTHER; note = 2'-O-methyl modified nucleotide
  modified_base 7: mod_base = OTHER; note = 2'-fluoro modified nucleotide
  modified_base 8: mod_base = OTHER; note = 2'-O-methyl modified nucleotide
  modified_base 9: mod_base = OTHER; note = 2'-O-methyl modified nucleotide
  modified_base 10: mod_base = OTHER; note = 2'-O-methyl modified nucleotide
  modified_base 11: mod_base = OTHER; note = 2'-O-methyl modified nucleotide
  modified_base 12: mod_base = OTHER; note = 2'-fluoro modified nucleotide
  modified_base 13: mod_base = OTHER; note = 2'-O-methyl modified nucleotide
  modified_base 14: mod_base = OTHER; note = 2'-fluoro modified nucleotide
  modified_base 15: mod_base = OTHER; note = 2'-O-methyl modified nucleotide
  modified_base 16: mod_base = OTHER; note = 2'-fluoro modified nucleotide
  modified_base 17: mod_base = OTHER; note = 2'-O-methyl modified nucleotide
  modified_base 18: mod_base = OTHER; note = 2'-O-methyl modified nucleotide
  modified_base 19: mod_base = OTHER; note = 2'-O-methyl modified nucleotide with thiophosphate linkage
  modified_base 20: mod_base = OTHER; note = 2'-O-methyl modified nucleotide with thiophosphate linkage
  modified_base 21: mod_base = OTHER; note = 2'-O-methyl modified nucleotide
ttcgataactctgtccattag

SEQ ID NO: 475 - RNA, 21 nt, synthetic construct
  source 1..21: mol_type = other RNA
  modified_base 1: mod_base = OTHER; note = 2'-O-methyl modified nucleotide with thiophosphate linkage
  modified_base 2: mod_base = OTHER; note = 2'-fluoro modified nucleotide with thiophosphate linkage
  modified_base 3: mod_base = OTHER; note = 2'-O-methyl modified nucleotide
  modified_base 4: mod_base = OTHER; note = 2'-O-methyl modified nucleotide
  modified_base 5: mod_base = OTHER; note = 2'-O-methyl modified nucleotide
  modified_base 6: mod_base = OTHER; note = 2'-O-methyl modified nucleotide
  modified_base 7: mod_base = OTHER; note = 2'-fluoro modified nucleotide
  modified_base 8: mod_base = OTHER; note = 2'-O-methyl modified nucleotide
  modified_base 9: mod_base = OTHER; note = 2'-O-methyl modified nucleotide
  modified_base 10: mod_base = OTHER; note = 2'-O-methyl modified nucleotide
  modified_base 11: mod_base = OTHER; note = 2'-O-methyl modified nucleotide
  modified_base 12: mod_base = OTHER; note = 2'-fluoro modified nucleotide
  modified_base 13: mod_base = OTHER; note = 2'-O-methyl modified nucleotide
  modified_base 14: mod_base = OTHER; note = 2'-fluoro modified nucleotide
  modified_base 15: mod_base = OTHER; note = 2'-O-methyl modified nucleotide
  modified_base 16: mod_base = OTHER; note = 2'-fluoro modified nucleotide
  modified_base 17: mod_base = OTHER; note = 2'-O-methyl modified nucleotide
  modified_base 18: mod_base = OTHER; note = 2'-O-methyl modified nucleotide
  modified_base 19: mod_base = OTHER; note = 2'-O-methyl modified nucleotide with thiophosphate linkage
  modified_base 20: mod_base = OTHER; note = 2'-O-methyl modified nucleotide with thiophosphate linkage
  modified_base 21: mod_base = OTHER; note = 2'-O-methyl modified nucleotide
tagtatgtgcctcgataactg

SEQ ID NO: 476 - RNA, 21 nt, synthetic construct
  source 1..21: mol_type = other RNA
  modified_base 1: mod_base = OTHER; note = 2'-O-methyl modified nucleotide with thiophosphate linkage
  modified_base 2: mod_base = OTHER; note = 2'-fluoro modified nucleotide with thiophosphate linkage
  modified_base 3: mod_base = OTHER; note = 2'-O-methyl modified nucleotide
  modified_base 4: mod_base = OTHER; note = 2'-O-methyl modified nucleotide
  modified_base 5: mod_base = OTHER; note = 2'-O-methyl modified nucleotide
  modified_base 6: mod_base = OTHER; note = 2'-O-methyl modified nucleotide
  modified_base 7: mod_base = OTHER; note = 2'-fluoro modified nucleotide
  modified_base 8: mod_base = OTHER; note = 2'-O-methyl modified nucleotide
  modified_base 9: mod_base = OTHER; note = 2'-O-methyl modified nucleotide
  modified_base 10: mod_base = OTHER; note = 2'-O-methyl modified nucleotide
  modified_base 11: mod_base = OTHER; note = 2'-O-methyl modified nucleotide
  modified_base 12: mod_base = OTHER; note = 2'-fluoro modified nucleotide
  modified_base 13: mod_base = OTHER; note = 2'-O-methyl modified nucleotide
  modified_base 14: mod_base = OTHER; note = 2'-fluoro modified nucleotide
  modified_base 15: mod_base = OTHER; note = 2'-O-methyl modified nucleotide
  modified_base 16: mod_base = OTHER; note = 2'-fluoro modified nucleotide
  modified_base 17: mod_base = OTHER; note = 2'-O-methyl modified nucleotide
  modified_base 18: mod_base = OTHER; note = 2'-O-methyl modified nucleotide
  modified_base 19: mod_base = OTHER; note = 2'-O-methyl modified nucleotide with thiophosphate linkage
  modified_base 20: mod_base = OTHER; note = 2'-O-methyl modified nucleotide with thiophosphate linkage
  modified_base 21: mod_base = OTHER; note = 2'-O-methyl modified nucleotide
tattgtgtcaggttgcagtag

SEQ ID NO: 477 - RNA, 21 nt, synthetic construct
  source 1..21: mol_type = other RNA
  modified_base 1: mod_base = OTHER; note = 2'-O-methyl modified nucleotide with thiophosphate linkage
  modified_base 2: mod_base = OTHER; note = 2'-fluoro modified nucleotide with thiophosphate linkage
  modified_base 3: mod_base = OTHER; note = 2'-O-methyl modified nucleotide
  modified_base 4: mod_base = OTHER; note = 2'-O-methyl modified nucleotide
  modified_base 5: mod_base = OTHER; note = 2'-O-methyl modified nucleotide
  modified_base 6: mod_base = OTHER; note = 2'-O-methyl modified nucleotide
  modified_base 7: mod_base = OTHER; note = 2'-fluoro modified nucleotide
  modified_base 8: mod_base = OTHER; note = 2'-O-methyl modified nucleotide
  modified_base 9: mod_base = OTHER; note = 2'-O-methyl modified nucleotide
  modified_base 10: mod_base = OTHER; note = 2'-O-methyl modified nucleotide
  modified_base 11: mod_base = OTHER; note = 2'-O-methyl modified nucleotide
  modified_base 12: mod_base = OTHER; note = 2'-fluoro modified nucleotide
  modified_base 13: mod_base = OTHER; note = 2'-O-methyl modified nucleotide
  modified_base 14: mod_base = OTHER; note = 2'-fluoro modified nucleotide
  modified_base 15: mod_base = OTHER; note = 2'-O-methyl modified nucleotide
  modified_base 16: mod_base = OTHER; note = 2'-fluoro modified nucleotide
  modified_base 17: mod_base = OTHER; note = 2'-O-methyl modified nucleotide
  modified_base 18: mod_base = OTHER; note = 2'-O-methyl modified nucleotide
  modified_base 19: mod_base = OTHER; note = 2'-O-methyl modified nucleotide with thiophosphate linkage
  modified_base 20: mod_base = OTHER; note = 2'-O-methyl modified nucleotide with thiophosphate linkage
  modified_base 21: mod_base = OTHER; note = 2'-O-methyl modified nucleotide
tcataatggtagtagcagtcg

SEQ ID NO: 478 - RNA, 21 nt, synthetic construct
  source 1..21: mol_type = other RNA
  modified_base 1: mod_base = OTHER; note = 2'-O-methyl modified nucleotide with thiophosphate linkage
  modified_base 2: mod_base = OTHER; note = 2'-fluoro modified nucleotide with thiophosphate linkage
  modified_base 3: mod_base = OTHER; note = 2'-O-methyl modified nucleotide
  modified_base 4: mod_base = OTHER; note = 2'-O-methyl modified nucleotide
  modified_base 5: mod_base = OTHER; note = 2'-O-methyl modified nucleotide
  modified_base 6: mod_base = OTHER; note = 2'-O-methyl modified nucleotide
  modified_base 7: mod_base = OTHER; note = 2'-fluoro modified nucleotide
  modified_base 8: mod_base = OTHER; note = 2'-O-methyl modified nucleotide
  modified_base 9: mod_base = OTHER; note = 2'-O-methyl modified nucleotide
  modified_base 10: mod_base = OTHER; note = 2'-O-methyl modified nucleotide
  modified_base 11: mod_base = OTHER; note = 2'-O-methyl modified nucleotide
  modified_base 12: mod_base = OTHER; note = 2'-fluoro modified nucleotide
  modified_base 13: mod_base = OTHER; note = 2'-O-methyl modified nucleotide
  modified_base 14: mod_base = OTHER; note = 2'-fluoro modified nucleotide
  modified_base 15: mod_base = OTHER; note = 2'-O-methyl modified nucleotide
  modified_base 16: mod_base = OTHER; note = 2'-fluoro modified nucleotide
  modified_base 17: mod_base = OTHER; note = 2'-O-methyl modified nucleotide
  modified_base 18: mod_base = OTHER; note = 2'-O-methyl modified nucleotide
  modified_base 19: mod_base = OTHER; note = 2'-O-methyl modified nucleotide with thiophosphate linkage
  modified_base 20: mod_base = OTHER; note = 2'-O-methyl modified nucleotide with thiophosphate linkage
  modified_base 21: mod_base = OTHER; note = 2'-O-methyl modified nucleotide
tagatgaccaagcttggcaac

SEQ ID NO: 479 - RNA, 21 nt, synthetic construct
  source 1..21: mol_type = other RNA
  modified_base 1: mod_base = OTHER; note = 2'-O-methyl modified nucleotide with thiophosphate linkage
  modified_base 2: mod_base = OTHER; note = 2'-fluoro modified nucleotide with thiophosphate linkage
  modified_base 3: mod_base = OTHER; note = 2'-O-methyl modified nucleotide
  modified_base 4: mod_base = OTHER; note = 2'-O-methyl modified nucleotide
  modified_base 5: mod_base = OTHER; note = 2'-O-methyl modified nucleotide
  modified_base 6: mod_base = OTHER; note = 2'-O-methyl modified nucleotide
  modified_base 7: mod_base = OTHER; note = 2'-fluoro modified nucleotide
  modified_base 8: mod_base = OTHER; note = 2'-O-methyl modified nucleotide
  modified_base 9: mod_base = OTHER; note = 2'-O-methyl modified nucleotide
  modified_base 10: mod_base = OTHER; note = 2'-O-methyl modified nucleotide
  modified_base 11: mod_base = OTHER; note = 2'-O-methyl modified nucleotide
  modified_base 12: mod_base = OTHER; note = 2'-fluoro modified nucleotide
  modified_base 13: mod_base = OTHER; note = 2'-O-methyl modified nucleotide
  modified_base 14: mod_base = OTHER; note = 2'-fluoro modified nucleotide
  modified_base 15: mod_base = OTHER; note = 2'-O-methyl modified nucleotide
  modified_base 16: mod_base = OTHER; note = 2'-fluoro modified nucleotide
  modified_base 17: mod_base = OTHER; note = 2'-O-methyl modified nucleotide
  modified_base 18: mod_base = OTHER; note = 2'-O-methyl modified nucleotide
  modified_base 19: mod_base = OTHER; note = 2'-O-methyl modified nucleotide with thiophosphate linkage
  modified_base 20: mod_base = OTHER; note = 2'-O-methyl modified nucleotide with thiophosphate linkage
  modified_base 21: mod_base = OTHER; note = 2'-O-methyl modified nucleotide
ttaacaccaagggcgaatctg

SEQ ID NO: 480 - RNA, 21 nt, synthetic construct
  source 1..21: mol_type = other RNA
  modified_base 1: mod_base = OTHER; note = 2'-O-methyl modified nucleotide with thiophosphate linkage
  modified_base 2: mod_base = OTHER; note = 2'-fluoro modified nucleotide with thiophosphate linkage
  modified_base 3: mod_base = OTHER; note = 2'-O-methyl modified nucleotide
  modified_base 4: mod_base = OTHER; note = 2'-O-methyl modified nucleotide
  modified_base 5: mod_base = OTHER; note = 2'-O-methyl modified nucleotide
  modified_base 6: mod_base = OTHER; note = 2'-O-methyl modified nucleotide
  modified_base 7: mod_base = OTHER; note = 2'-fluoro modified nucleotide
  modified_base 8: mod_base = OTHER; note = 2'-O-methyl modified nucleotide
  modified_base 9: mod_base = OTHER; note = 2'-O-methyl modified nucleotide
  modified_base 10: mod_base = OTHER; note = 2'-O-methyl modified nucleotide
  modified_base 11: mod_base = OTHER; note = 2'-O-methyl modified nucleotide
  modified_base 12: mod_base = OTHER; note = 2'-fluoro modified nucleotide
  modified_base 13: mod_base = OTHER; note = 2'-O-methyl modified nucleotide
  modified_base 14: mod_base = OTHER; note = 2'-fluoro modified nucleotide
  modified_base 15: mod_base = OTHER; note = 2'-O-methyl modified nucleotide
  modified_base 16: mod_base = OTHER; note = 2'-fluoro modified nucleotide
  modified_base 17: mod_base = OTHER; note = 2'-O-methyl modified nucleotide
  modified_base 18: mod_base = OTHER; note = 2'-O-methyl modified nucleotide
  modified_base 19: mod_base = OTHER; note = 2'-O-methyl modified nucleotide with thiophosphate linkage
  modified_base 20: mod_base = OTHER; note = 2'-O-methyl modified nucleotide with thiophosphate linkage
  modified_base 21: mod_base = OTHER; note = 2'-O-methyl modified nucleotide
tcaagactgacatgtccttcg

SEQ ID NO: 481 - RNA, 21 nt, synthetic construct
  source 1..21: mol_type = other RNA
  modified_base 1: mod_base = OTHER; note = 2'-O-methyl modified nucleotide with thiophosphate linkage
  modified_base 2: mod_base = OTHER; note = 2'-fluoro modified nucleotide with thiophosphate linkage
  modified_base 3: mod_base = OTHER; note = 2'-O-methyl modified nucleotide
  modified_base 4: mod_base = OTHER; note = 2'-O-methyl modified nucleotide
  modified_base 5: mod_base = OTHER; note = 2'-O-methyl modified nucleotide
  modified_base 6: mod_base = OTHER; note = 2'-O-methyl modified nucleotide
  modified_base 7: mod_base = OTHER; note = 2'-fluoro modified nucleotide
  modified_base 8: mod_base = OTHER; note = 2'-O-methyl modified nucleotide
  modified_base 9: mod_base = OTHER; note = 2'-O-methyl modified nucleotide
  modified_base 10: mod_base = OTHER; note = 2'-O-methyl modified nucleotide
  modified_base 11: mod_base = OTHER; note = 2'-O-methyl modified nucleotide
  modified_base 12: mod_base = OTHER; note = 2'-fluoro modified nucleotide
  modified_base 13: mod_base = OTHER; note = 2'-O-methyl modified nucleotide
  modified_base 14: mod_base = OTHER; note = 2'-fluoro modified nucleotide
  modified_base 15: mod_base = OTHER; note = 2'-O-methyl modified nucleotide
  modified_base 16: mod_base = OTHER; note = 2'-fluoro modified nucleotide
  modified_base 17: mod_base = OTHER; note = 2'-O-methyl modified nucleotide
  modified_base 18: mod_base = OTHER; note = 2'-O-methyl modified nucleotide
  modified_base 19: mod_base = OTHER; note = 2'-O-methyl modified nucleotide with thiophosphate linkage
  modified_base 20: mod_base = OTHER; note = 2'-O-methyl modified nucleotide with thiophosphate linkage
  modified_base 21: mod_base = OTHER; note = 2'-O-methyl modified nucleotide
tcatggtataacaccaaggag

SEQ ID NO: 482 - RNA, 21 nt, synthetic construct
  source 1..21: mol_type = other RNA
  modified_base 1: mod_base = OTHER; note = 2'-O-methyl modified nucleotide with thiophosphate linkage
  modified_base 2: mod_base = OTHER; note = 2'-fluoro modified nucleotide with thiophosphate linkage
  modified_base 3: mod_base = OTHER; note = 2'-O-methyl modified nucleotide
  modified_base 4: mod_base = OTHER; note = 2'-O-methyl modified nucleotide
  modified_base 5: mod_base = OTHER; note = 2'-O-methyl modified nucleotide
  modified_base 6: mod_base = OTHER; note = 2'-O-methyl modified nucleotide
  modified_base 7: mod_base = OTHER; note = 2'-fluoro modified nucleotide
  modified_base 8: mod_base = OTHER; note = 2'-O-methyl modified nucleotide
  modified_base 9: mod_base = OTHER; note = 2'-O-methyl modified nucleotide
  modified_base 10: mod_base = OTHER; note = 2'-O-methyl modified nucleotide
  modified_base 11: mod_base = OTHER; note = 2'-O-methyl modified nucleotide
  modified_base 12: mod_base = OTHER; note = 2'-fluoro modified nucleotide
  modified_base 13: mod_base = OTHER; note = 2'-O-methyl modified nucleotide
  modified_base 14: mod_base = OTHER; note = 2'-fluoro modified nucleotide
  modified_base 15: mod_base = OTHER; note = 2'-O-methyl modified nucleotide
  modified_base 16: mod_base = OTHER; note = 2'-fluoro modified nucleotide
  modified_base 17: mod_base = OTHER; note = 2'-O-methyl modified nucleotide
  modified_base 18: mod_base = OTHER; note = 2'-O-methyl modified nucleotide
  modified_base 19: mod_base = OTHER; note = 2'-O-methyl modified nucleotide with thiophosphate linkage
  modified_base 20: mod_base = OTHER; note = 2'-O-methyl modified nucleotide with thiophosphate linkage
  modified_base 21: mod_base = OTHER; note = 2'-O-methyl modified nucleotide
tcatggtataacaccaagggg

SEQ ID NO: 483 - RNA, 21 nt, synthetic construct
  source 1..21: mol_type = other RNA
  modified_base 1: mod_base = OTHER; note = 2'-O-methyl modified nucleotide with thiophosphate linkage
  modified_base 2: mod_base = OTHER; note = 2'-fluoro modified nucleotide with thiophosphate linkage
  modified_base 3: mod_base = OTHER; note = 2'-O-methyl modified nucleotide
  modified_base 4: mod_base = OTHER; note = 2'-O-methyl modified nucleotide
  modified_base 5: mod_base = OTHER; note = 2'-O-methyl modified nucleotide
  modified_base 6: mod_base = OTHER; note = 2'-O-methyl modified nucleotide
  modified_base 7: mod_base = OTHER; note = 2'-fluoro modified nucleotide
  modified_base 8: mod_base = OTHER; note = 2'-O-methyl modified nucleotide
  modified_base 9: mod_base = OTHER; note = 2'-O-methyl modified nucleotide
  modified_base 10: mod_base = OTHER; note = 2'-O-methyl modified nucleotide
  modified_base 11: mod_base = OTHER; note = 2'-O-methyl modified nucleotide
  modified_base 12: mod_base = OTHER; note = 2'-fluoro modified nucleotide
  modified_base 13: mod_base = OTHER; note = 2'-O-methyl modified nucleotide
  modified_base 14: mod_base = OTHER; note = 2'-fluoro modified nucleotide
  modified_base 15: mod_base = OTHER; note = 2'-O-methyl modified nucleotide
  modified_base 16: mod_base = OTHER; note = 2'-fluoro modified nucleotide
  modified_base 17: mod_base = OTHER; note = 2'-O-methyl modified nucleotide
  modified_base 18: mod_base = OTHER; note = 2'-O-methyl modified nucleotide
  modified_base 19: mod_base = OTHER; note = 2'-O-methyl modified nucleotide with thiophosphate linkage
  modified_base 20: mod_base = OTHER; note = 2'-O-methyl modified nucleotide with thiophosphate linkage
  modified_base 21: mod_base = OTHER; note = 2'-O-methyl modified nucleotide
ttgtttctgagcattgtgtcc

SEQ ID NO: 484 - RNA, 21 nt, synthetic construct
  source 1..21: mol_type = other RNA
  modified_base 1: mod_base = OTHER; note = 2'-O-methyl modified nucleotide with thiophosphate linkage
  modified_base 2: mod_base = OTHER; note = 2'-fluoro modified nucleotide with thiophosphate linkage
  modified_base 3: mod_base = OTHER; note = 2'-O-methyl modified nucleotide
  modified_base 4: mod_base = OTHER; note = 2'-O-methyl modified nucleotide
  modified_base 5: mod_base = OTHER; note = 2'-O-methyl modified nucleotide
  modified_base 6: mod_base = OTHER; note = 2'-O-methyl modified nucleotide
  modified_base 7: mod_base = OTHER; note = 2'-fluoro modified nucleotide
  modified_base 8: mod_base = OTHER; note = 2'-O-methyl modified nucleotide
  modified_base 9: mod_base = OTHER; note = 2'-O-methyl modified nucleotide
  modified_base 10: mod_base = OTHER; note = 2'-O-methyl modified nucleotide
  modified_base 11: mod_base = OTHER; note = 2'-O-methyl modified nucleotide
  modified_base 12: mod_base = OTHER; note = 2'-fluoro modified nucleotide
  modified_base 13: mod_base = OTHER; note = 2'-O-methyl modified nucleotide
  modified_base 14: mod_base = OTHER; note = 2'-fluoro modified nucleotide
  modified_base 15: mod_base = OTHER; note = 2'-O-methyl modified nucleotide
  modified_base 16: mod_base = OTHER; note = 2'-fluoro modified nucleotide
  modified_base 17: mod_base = OTHER; note = 2'-O-methyl modified nucleotide
  modified_base 18: mod_base = OTHER; note = 2'-O-methyl modified nucleotide
  modified_base 19: mod_base = OTHER; note = 2'-O-methyl modified nucleotide with thiophosphate linkage
  modified_base 20: mod_base = OTHER; note = 2'-O-methyl modified nucleotide with thiophosphate linkage
  modified_base 21: mod_base = OTHER; note = 2'-O-methyl modified nucleotide
ttcgataactctgtccatcag

SEQ ID NO: 485 - RNA, 21 nt, synthetic construct
  source 1..21: mol_type = other RNA
  modified_base 1: mod_base = OTHER; note = 2'-O-methyl modified nucleotide with thiophosphate linkage
  modified_base 2: mod_base = OTHER; note = 2'-fluoro modified nucleotide with thiophosphate linkage
  modified_base 3: mod_base = OTHER; note = 2'-O-methyl modified nucleotide
  modified_base 4: mod_base = OTHER; note = 2'-O-methyl modified nucleotide
  modified_base 5: mod_base = OTHER; note = 2'-O-methyl modified nucleotide
  modified_base 6: mod_base = OTHER; note = 2'-O-methyl modified nucleotide
  modified_base 7: mod_base = OTHER; note = 2'-fluoro modified nucleotide
  modified_base 8: mod_base = OTHER; note = 2'-O-methyl modified nucleotide
  modified_base 9: mod_base = OTHER; note = 2'-O-methyl modified nucleotide
  modified_base 10: mod_base = OTHER; note = 2'-O-methyl modified nucleotide
  modified_base 11: mod_base = OTHER; note = 2'-O-methyl modified nucleotide
  modified_base 12: mod_base = OTHER; note = 2'-fluoro modified nucleotide
  modified_base 13: mod_base = OTHER; note = 2'-O-methyl modified nucleotide
  modified_base 14: mod_base = OTHER; note = 2'-fluoro modified nucleotide
  modified_base 15: mod_base = OTHER; note = 2'-O-methyl modified nucleotide
  modified_base 16: mod_base = OTHER; note = 2'-fluoro modified nucleotide
  modified_base 17: mod_base = OTHER; note = 2'-O-methyl modified nucleotide
  modified_base 18: mod_base = OTHER; note = 2'-O-methyl modified nucleotide
  modified_base 19: mod_base = OTHER; note = 2'-O-methyl modified nucleotide with thiophosphate linkage
  modified_base 20: mod_base = OTHER; note = 2'-O-methyl modified nucleotide with thiophosphate linkage
  modified_base 21: mod_base = OTHER; note = 2'-O-methyl modified nucleotide
ttcgtataacaataaggagcc

SEQ ID NO: 486 - RNA, 21 nt, synthetic construct
  source 1..21: mol_type = other RNA
  modified_base 1: mod_base = OTHER; note = 2'-O-methyl modified nucleotide with thiophosphate linkage
  modified_base 2: mod_base = OTHER; note = 2'-fluoro modified nucleotide with thiophosphate linkage
  modified_base 3: mod_base = OTHER; note = 2'-O-methyl modified nucleotide
  modified_base 4: mod_base = OTHER; note = 2'-O-methyl modified nucleotide
  modified_base 5: mod_base = OTHER; note = 2'-O-methyl modified nucleotide
  modified_base 6: mod_base = OTHER; note = 2'-O-methyl modified nucleotide
  modified_base 7: mod_base = OTHER; note = 2'-fluoro modified nucleotide
  modified_base 8: mod_base = OTHER; note = 2'-O-methyl modified nucleotide
  modified_base 9: mod_base = OTHER; note = 2'-O-methyl modified nucleotide
  modified_base 10: mod_base = OTHER; note = 2'-O-methyl modified nucleotide
  modified_base 11: mod_base = OTHER; note = 2'-O-methyl modified nucleotide
  modified_base 12: mod_base = OTHER; note = 2'-fluoro modified nucleotide
  modified_base 13: mod_base = OTHER; note = 2'-O-methyl modified nucleotide
  modified_base 14: mod_base = OTHER; note = 2'-fluoro modified nucleotide
  modified_base 15: mod_base = OTHER; note = 2'-O-methyl modified nucleotide
  modified_base 16: mod_base = OTHER; note = 2'-fluoro modified nucleotide
  modified_base 17: mod_base = OTHER; note = 2'-O-methyl modified nucleotide
  modified_base 18: mod_base = OTHER; note = 2'-O-methyl modified nucleotide
  modified_base 19: mod_base = OTHER; note = 2'-O-methyl modified nucleotide with thiophosphate linkage
  modified_base 20: mod_base = OTHER; note = 2'-O-methyl modified nucleotide with thiophosphate linkage
  modified_base 21: mod_base = OTHER; note = 2'-O-methyl modified nucleotide
tctttgctcagttggtgcttc

SEQ ID NO: 487 - RNA, 21 nt, synthetic construct
  source 1..21: mol_type = other RNA
  modified_base 1: mod_base = OTHER; note = 2'-O-methyl modified nucleotide with thiophosphate linkage
  modified_base 2: mod_base = OTHER; note = 2'-fluoro modified nucleotide with thiophosphate linkage
  modified_base 3: mod_base = OTHER; note = 2'-O-methyl modified nucleotide
  modified_base 4: mod_base = OTHER; note = 2'-O-methyl modified nucleotide
  modified_base 5: mod_base = OTHER; note = 2'-O-methyl modified nucleotide
  modified_base 6: mod_base = OTHER; note = 2'-O-methyl modified nucleotide
  modified_base 7: mod_base = OTHER; note = 2'-fluoro modified nucleotide
  modified_base 8: mod_base = OTHER; note = 2'-O-methyl modified nucleotide
  modified_base 9: mod_base = OTHER; note = 2'-O-methyl modified nucleotide
  modified_base 10: mod_base = OTHER; note = 2'-O-methyl modified nucleotide
  modified_base 11: mod_base = OTHER; note = 2'-O-methyl modified nucleotide
  modified_base 12: mod_base = OTHER; note = 2'-fluoro modified nucleotide
  modified_base 13: mod_base = OTHER; note = 2'-O-methyl modified nucleotide
  modified_base 14: mod_base = OTHER; note = 2'-fluoro modified nucleotide
  modified_base 15: mod_base = OTHER; note = 2'-O-methyl modified nucleotide
  modified_base 16: mod_base = OTHER; note = 2'-fluoro modified nucleotide
  modified_base 17: mod_base = OTHER; note = 2'-O-methyl modified nucleotide
  modified_base 18: mod_base = OTHER; note = 2'-O-methyl modified nucleotide
  modified_base 19: mod_base = OTHER; note = 2'-O-methyl modified nucleotide with thiophosphate linkage
  modified_base 20: mod_base = OTHER; note = 2'-O-methyl modified nucleotide with thiophosphate linkage
  modified_base 21: mod_base = OTHER; note = 2'-O-methyl modified nucleotide
tgataactctgtccatttccc

SEQ ID NO: 488 - RNA, 21 nt, synthetic construct
  source 1..21: mol_type = other RNA
  modified_base 1: mod_base = OTHER; note = 2'-O-methyl modified nucleotide with thiophosphate linkage
  modified_base 2: mod_base = OTHER; note = 2'-fluoro modified nucleotide with thiophosphate linkage
  modified_base 3: mod_base = OTHER; note = 2'-O-methyl modified nucleotide
  modified_base 4: mod_base = OTHER; note = 2'-O-methyl modified nucleotide
  modified_base 5: mod_base = OTHER; note = 2'-O-methyl modified nucleotide
  modified_base 6: mod_base = OTHER; note = 2'-O-methyl modified nucleotide
  modified_base 7: mod_base = OTHER; note = 2'-fluoro modified nucleotide
  modified_base 8: mod_base = OTHER; note = 2'-O-methyl modified nucleotide
  modified_base 9: mod_base = OTHER; note = 2'-O-methyl modified nucleotide
  modified_base 10: mod_base = OTHER; note = 2'-O-methyl modified nucleotide
  modified_base 11: mod_base = OTHER; note = 2'-O-methyl modified nucleotide
  modified_base 12: mod_base = OTHER; note = 2'-fluoro modified nucleotide
  modified_base 13: mod_base = OTHER; note = 2'-O-methyl modified nucleotide
  modified_base 14: mod_base = OTHER; note = 2'-fluoro modified nucleotide
  modified_base 15: mod_base = OTHER; note = 2'-O-methyl modified nucleotide
  modified_base 16: mod_base = OTHER; note = 2'-fluoro modified nucleotide
  modified_base 17: mod_base = OTHER; note = 2'-O-methyl modified nucleotide
  modified_base 18: mod_base = OTHER; note = 2'-O-methyl modified nucleotide
  modified_base 19: mod_base = OTHER; note = 2'-O-methyl modified nucleotide with thiophosphate linkage
  modified_base 20: mod_base = OTHER; note = 2'-O-methyl modified nucleotide with thiophosphate linkage
  modified_base 21: mod_base = OTHER; note = 2'-O-methyl modified nucleotide
ttccataatggtagtagcagc

SEQ ID NO: 489 - RNA, 21 nt, synthetic construct
  source 1..21: mol_type = other RNA
  modified_base 1: mod_base = OTHER; note = 2'-O-methyl modified nucleotide with thiophosphate linkage
  modified_base 2: mod_base = OTHER; note = 2'-fluoro modified nucleotide with thiophosphate linkage
  modified_base 3: mod_base = OTHER; note = 2'-O-methyl modified nucleotide
  modified_base 4: mod_base = OTHER; note = 2'-O-methyl modified nucleotide
  modified_base 5: mod_base = OTHER; note = 2'-O-methyl modified nucleotide
  modified_base 6: mod_base = OTHER; note = 2'-O-methyl modified nucleotide
  modified_base 7: mod_base = OTHER; note = 2'-fluoro modified nucleotide
  modified_base 8: mod_base = OTHER; note = 2'-O-methyl modified nucleotide
  modified_base 9: mod_base = OTHER; note = 2'-O-methyl modified nucleotide
  modified_base 10: mod_base = OTHER; note = 2'-O-methyl modified nucleotide
  modified_base 11: mod_base = OTHER; note = 2'-O-methyl modified nucleotide
  modified_base 12: mod_base = OTHER; note = 2'-fluoro modified nucleotide
  modified_base 13: mod_base = OTHER; note = 2'-O-methyl modified nucleotide
  modified_base 14: mod_base = OTHER; note = 2'-fluoro modified nucleotide
  modified_base 15: mod_base = OTHER; note = 2'-O-methyl modified nucleotide
  modified_base 16: mod_base = OTHER; note = 2'-fluoro modified nucleotide
  modified_base 17: mod_base = OTHER; note = 2'-O-methyl modified nucleotide
  modified_base 18: mod_base = OTHER; note = 2'-O-methyl modified nucleotide
  modified_base 19: mod_base = OTHER; note = 2'-O-methyl modified nucleotide with thiophosphate linkage
  modified_base 20: mod_base = OTHER; note = 2'-O-methyl modified nucleotide with thiophosphate linkage
  modified_base 21: mod_base = OTHER; note = 2'-O-methyl modified nucleotide
tgaatctcagcatctggattg

SEQ ID NO: 490 - RNA, 21 nt, synthetic construct
  source 1..21: mol_type = other RNA
  modified_base 1: mod_base = OTHER; note = 2'-O-methyl modified nucleotide with thiophosphate linkage
  modified_base 2: mod_base = OTHER; note = 2'-fluoro modified nucleotide with thiophosphate linkage
  modified_base 3: mod_base = OTHER; note = 2'-O-methyl modified nucleotide
  modified_base 4: mod_base = OTHER; note = 2'-O-methyl modified nucleotide
  modified_base 5: mod_base = OTHER; note = 2'-O-methyl modified nucleotide
  modified_base 6: mod_base = OTHER; note = 2'-O-methyl modified nucleotide
  modified_base 7: mod_base = OTHER; note = 2'-fluoro modified nucleotide
  modified_base 8: mod_base = OTHER; note = 2'-O-methyl modified nucleotide
  modified_base 9: mod_base = OTHER; note = 2'-O-methyl modified nucleotide
  modified_base 10: mod_base = OTHER; note = 2'-O-methyl modified nucleotide
  modified_base 11: mod_base = OTHER; note = 2'-O-methyl modified nucleotide
  modified_base 12: mod_base = OTHER; note = 2'-fluoro modified nucleotide
  modified_base 13: mod_base = OTHER; note = 2'-O-methyl modified nucleotide
  modified_base 14: mod_base = OTHER; note = 2'-fluoro modified nucleotide
  modified_base 15: mod_base = OTHER; note = 2'-O-methyl modified nucleotide
  modified_base 16: mod_base = OTHER; note = 2'-fluoro modified nucleotide
  modified_base 17: mod_base = OTHER; note = 2'-O-methyl modified nucleotide
  modified_base 18: mod_base = OTHER; note = 2'-O-methyl modified nucleotide
  modified_base 19: mod_base = OTHER; note = 2'-O-methyl modified nucleotide with thiophosphate linkage
  modified_base 20: mod_base = OTHER; note = 2'-O-methyl modified nucleotide with thiophosphate linkage
  modified_base 21: mod_base = OTHER; note = 2'-O-methyl modified nucleotide
ttgtaacagtggtggagaatc

SEQ ID NO: 491 - RNA, 21 nt, synthetic construct
  source 1..21: mol_type = other RNA
  modified_base 1: mod_base = OTHER; note = 2'-O-methyl modified nucleotide with thiophosphate linkage
  modified_base 2: mod_base = OTHER; note = 2'-fluoro modified nucleotide with thiophosphate linkage
  modified_base 3: mod_base = OTHER; note = 2'-O-methyl modified nucleotide
  modified_base 4: mod_base = OTHER; note = 2'-O-methyl modified nucleotide
  modified_base 5: mod_base = OTHER; note = 2'-O-methyl modified nucleotide
  modified_base 6: mod_base = OTHER; note = 2'-O-methyl modified nucleotide
  modified_base 7: mod_base = OTHER; note = 2'-fluoro modified nucleotide
  modified_base 8: mod_base = OTHER; note = 2'-O-methyl modified nucleotide
  modified_base 9: mod_base = OTHER; note = 2'-O-methyl modified nucleotide
  modified_base 10: mod_base = OTHER; note = 2'-O-methyl modified nucleotide
  modified_base 11: mod_base = OTHER; note = 2'-O-methyl modified nucleotide
  modified_base 12: mod_base = OTHER; note = 2'-fluoro modified nucleotide
  modified_base 13: mod_base = OTHER; note = 2'-O-methyl modified nucleotide
  modified_base 14: mod_base = OTHER; note = 2'-fluoro modified nucleotide
  modified_base 15: mod_base = OTHER; note = 2'-O-methyl modified nucleotide
  modified_base 16: mod_base = OTHER; note = 2'-fluoro modified nucleotide
  modified_base 17: mod_base = OTHER; note = 2'-O-methyl modified nucleotide
  modified_base 18: mod_base = OTHER; note = 2'-O-methyl modified nucleotide
  modified_base 19: mod_base = OTHER; note = 2'-O-methyl modified nucleotide with thiophosphate linkage
  modified_base 20: mod_base = OTHER; note = 2'-O-methyl modified nucleotide with thiophosphate linkage
  modified_base 21: mod_base = OTHER; note = 2'-O-methyl modified nucleotide
tccatttgggtagtattctgc

SEQ ID NO: 492 - RNA, 21 nt, synthetic construct
  source 1..21: mol_type = other RNA
  modified_base 1: mod_base = OTHER; note = 2'-O-methyl modified nucleotide with thiophosphate linkage
  modified_base 2: mod_base = OTHER; note = 2'-fluoro modified nucleotide with thiophosphate linkage
  modified_base 3: mod_base = OTHER; note = 2'-O-methyl modified nucleotide
  modified_base 4: mod_base = OTHER; note = 2'-O-methyl modified nucleotide
  modified_base 5: mod_base = OTHER; note = 2'-O-methyl modified nucleotide
  modified_base 6: mod_base = OTHER; note = 2'-O-methyl modified nucleotide
  modified_base 7: mod_base = OTHER; note = 2'-fluoro modified nucleotide
  modified_base 8: mod_base = OTHER; note = 2'-O-methyl modified nucleotide
  modified_base 9: mod_base = OTHER; note = 2'-O-methyl modified nucleotide
  modified_base 10: mod_base = OTHER; note = 2'-O-methyl modified nucleotide
  modified_base 11: mod_base = OTHER; note = 2'-O-methyl modified nucleotide
  modified_base 12: mod_base = OTHER; note = 2'-fluoro modified nucleotide
  modified_base 13: mod_base = OTHER; note = 2'-O-methyl modified nucleotide
  modified_base 14: mod_base = OTHER; note = 2'-fluoro modified nucleotide
  modified_base 15: mod_base = OTHER; note = 2'-O-methyl modified nucleotide
  modified_base 16: mod_base = OTHER; note = 2'-fluoro modified nucleotide
  modified_base 17: mod_base = OTHER; note = 2'-O-methyl modified nucleotide
  modified_base 18: mod_base = OTHER; note = 2'-O-methyl modified nucleotide
  modified_base 19: mod_base = OTHER; note = 2'-O-methyl modified nucleotide with thiophosphate linkage
  modified_base 20: mod_base = OTHER; note = 2'-O-methyl modified nucleotide with thiophosphate linkage
  modified_base 21: mod_base = OTHER; note = 2'-O-methyl modified nucleotide
tataacaccaagggcgaatcc

SEQ ID NO: 493 - RNA, 21 nt, synthetic construct
  source 1..21: mol_type = other RNA
  modified_base 1: mod_base = OTHER; note = 2'-O-methyl modified nucleotide with thiophosphate linkage
  modified_base 2: mod_base = OTHER; note = 2'-fluoro modified nucleotide with thiophosphate linkage
  modified_base 3: mod_base = OTHER; note = 2'-O-methyl modified nucleotide
  modified_base 4: mod_base = OTHER; note = 2'-O-methyl modified nucleotide
  modified_base 5: mod_base = OTHER; note = 2'-O-methyl modified nucleotide
  modified_base 6: mod_base = OTHER; note = 2'-O-methyl modified nucleotide
  modified_base 7: mod_base = OTHER; note = 2'-fluoro modified nucleotide
  modified_base 8: mod_base = OTHER; note = 2'-O-methyl modified nucleotide
  modified_base 9: mod_base = OTHER; note = 2'-O-methyl modified nucleotide
  modified_base 10: mod_base = OTHER; note = 2'-O-methyl modified nucleotide
  modified_base 11: mod_base = OTHER; note = 2'-O-methyl modified nucleotide
  modified_base 12: mod_base = OTHER; note = 2'-fluoro modified nucleotide
  modified_base 13: mod_base = OTHER; note = 2'-O-methyl modified nucleotide
  modified_base 14: mod_base = OTHER; note = 2'-fluoro modified nucleotide
  modified_base 15: mod_base = OTHER; note = 2'-O-methyl modified nucleotide
  modified_base 16: mod_base = OTHER; note = 2'-fluoro modified nucleotide
  modified_base 17: mod_base = OTHER; note = 2'-O-methyl modified nucleotide
  modified_base 18: mod_base = OTHER; note = 2'-O-methyl modified nucleotide
  modified_base 19: mod_base = OTHER; note = 2'-O-methyl modified nucleotide with thiophosphate linkage
  modified_base 20: mod_base = OTHER; note = 2'-O-methyl modified nucleotide with thiophosphate linkage
  modified_base 21: mod_base = OTHER; note = 2'-O-methyl modified nucleotide
ttataacaccaagggcgaatg

SEQ ID NO: 494 - RNA, 21 nt, synthetic construct
  source 1..21: mol_type = other RNA
  modified_base 1: mod_base = OTHER; note = 2'-O-methyl modified nucleotide with thiophosphate linkage
  modified_base 2: mod_base = OTHER; note = 2'-fluoro modified nucleotide with thiophosphate linkage
  modified_base 3: mod_base = OTHER; note = 2'-O-methyl modified nucleotide
  modified_base 4: mod_base = OTHER; note = 2'-O-methyl modified nucleotide
  modified_base 5: mod_base = OTHER; note = 2'-fluoro modified nucleotide
  modified_base 6: mod_base = OTHER; note = 2'-O-methyl modified nucleotide
  modified_base 7: mod_base = OTHER; note = Unlocked nucleic acid
  modified_base 8: mod_base = OTHER; note = 2'-O-methyl modified nucleotide
  modified_base 9: mod_base = OTHER; note = 2'-O-methyl modified nucleotide
  modified_base 10: mod_base = OTHER; note = 2'-O-methyl modified nucleotide
  modified_base 11: mod_base = OTHER; note = 2'-O-methyl modified nucleotide
  modified_base 12: mod_base = OTHER; note = 2'-fluoro modified nucleotide
  modified_base 13: mod_base = OTHER; note = 2'-O-methyl modified nucleotide
  modified_base 14: mod_base = OTHER; note = 2'-fluoro modified nucleotide
  modified_base 15: mod_base = OTHER; note = 2'-O-methyl modified nucleotide
  modified_base 16: mod_base = OTHER; note = 2'-fluoro modified nucleotide
  modified_base 17: mod_base = OTHER; note = 2'-O-methyl modified nucleotide
  modified_base 18: mod_base = OTHER; note = 2'-O-methyl modified nucleotide
  modified_base 19: mod_base = OTHER; note = 2'-O-methyl modified nucleotide with thiophosphate linkage
  modified_base 20: mod_base = OTHER; note = 2'-O-methyl modified nucleotide with thiophosphate linkage
  modified_base 21: mod_base = OTHER; note = 2'-O-methyl modified nucleotide
tcctcgataactctgtccatg

SEQ ID NO: 495 - RNA, 21 nt, synthetic construct
  source 1..21: mol_type = other RNA
  modified_base 1: mod_base = OTHER; note = 2'-O-methyl modified nucleotide with thiophosphate linkage
  modified_base 2: mod_base = OTHER; note = 2'-fluoro modified nucleotide with thiophosphate linkage
  modified_base 3: mod_base = OTHER; note = 2'-O-methyl modified nucleotide
  modified_base 4: mod_base = OTHER; note = 2'-O-methyl modified nucleotide
  modified_base 5: mod_base = OTHER; note = 2'-O-methyl modified nucleotide
  modified_base 6: mod_base = OTHER; note = 2'-O-methyl modified nucleotide
  modified_base 7: mod_base = OTHER; note = 2'-fluoro modified nucleotide
  modified_base 8: mod_base = OTHER; note = 2'-O-methyl modified nucleotide
  modified_base 9: mod_base = OTHER; note = 2'-O-methyl modified nucleotide
  modified_base 10: mod_base = OTHER; note = 2'-O-methyl modified nucleotide
  modified_base 11: mod_base = OTHER; note = 2'-O-methyl modified nucleotide
  modified_base 12: mod_base = OTHER; note = 2'-fluoro modified nucleotide
  modified_base 13: mod_base = OTHER; note = 2'-O-methyl modified nucleotide
  modified_base 14: mod_base = OTHER; note = 2'-fluoro modified nucleotide
  modified_base 15: mod_base = OTHER; note = 2'-O-methyl modified nucleotide
  modified_base 16: mod_base = OTHER; note = 2'-fluoro modified nucleotide
  modified_base 17: mod_base = OTHER; note = 2'-O-methyl modified nucleotide
  modified_base 18: mod_base = OTHER; note = 2'-O-methyl modified nucleotide
  modified_base 19: mod_base = OTHER; note = 2'-O-methyl modified nucleotide with thiophosphate linkage
  modified_base 20: mod_base = OTHER; note = 2'-O-methyl modified nucleotide with thiophosphate linkage
  modified_base 21: mod_base = OTHER; note = 2'-O-methyl modified nucleotide
tagatgaccaagcttggcagc

SEQ ID NO: 496 - RNA, 21 nt, synthetic construct
  source 1..21: mol_type = other RNA
  modified_base 1: mod_base = OTHER; note = 2'-O-methyl modified nucleotide with thiophosphate linkage
  modified_base 2: mod_base = OTHER; note = 2'-fluoro modified nucleotide with thiophosphate linkage
  modified_base 3: mod_base = OTHER; note = 2'-O-methyl modified nucleotide
  modified_base 4: mod_base = OTHER; note = 2'-O-methyl modified nucleotide
  modified_base 5: mod_base = OTHER; note = 2'-O-methyl modified nucleotide
  modified_base 6: mod_base = OTHER; note = 2'-O-methyl modified nucleotide
  modified_base 7: mod_base = OTHER; note = 2'-fluoro modified nucleotide
  modified_base 8: mod_base = OTHER; note = 2'-O-methyl modified nucleotide
  modified_base 9: mod_base = OTHER; note = 2'-O-methyl modified nucleotide
  modified_base 10: mod_base = OTHER; note = 2'-O-methyl modified nucleotide
  modified_base 11: mod_base = OTHER; note = 2'-O-methyl modified nucleotide
  modified_base 12: mod_base = OTHER; note = 2'-fluoro modified nucleotide
  modified_base 13: mod_base = OTHER; note = 2'-O-methyl modified nucleotide
  modified_base 14: mod_base = OTHER; note = 2'-fluoro modified nucleotide
  modified_base 15: mod_base = OTHER; note = 2'-O-methyl modified nucleotide
  modified_base 16: mod_base = OTHER; note = 2'-fluoro modified nucleotide
  modified_base 17: mod_base = OTHER; note = 2'-O-methyl modified nucleotide
  modified_base 18: mod_base = OTHER; note = 2'-O-methyl modified nucleotide
  modified_base 19: mod_base = OTHER; note = 2'-O-methyl modified nucleotide with thiophosphate linkage
  modified_base 20: mod_base = OTHER; note = 2'-O-methyl modified nucleotide with thiophosphate linkage
  modified_base 21: mod_base = OTHER; note = 2'-O-methyl modified nucleotide
tcatagatgaccaagcttggg

SEQ ID NO: 497 - RNA, 21 nt, synthetic construct
  source 1..21: mol_type = other RNA
  modified_base 1: mod_base = OTHER; note = 2'-O-methyl modified nucleotide with thiophosphate linkage
  modified_base 2: mod_base = OTHER; note = 2'-fluoro modified nucleotide with thiophosphate linkage
  modified_base 3: mod_base = OTHER; note = 2'-O-methyl modified nucleotide
  modified_base 4: mod_base = OTHER; note = 2'-O-methyl modified nucleotide
  modified_base 5: mod_base = OTHER; note = 2'-O-methyl modified nucleotide
  modified_base 6: mod_base = OTHER; note = 2'-O-methyl modified nucleotide
  modified_base 7: mod_base = OTHER; note = 2'-fluoro modified nucleotide
  modified_base 8: mod_base = OTHER; note = 2'-O-methyl modified nucleotide
  modified_base 9: mod_base = OTHER; note = 2'-O-methyl modified nucleotide
  modified_base 10: mod_base = OTHER; note = 2'-O-methyl modified nucleotide
  modified_base 11: mod_base = OTHER; note = 2'-O-methyl modified nucleotide
  modified_base 12: mod_base = OTHER; note = 2'-fluoro modified nucleotide
  modified_base 13: mod_base = OTHER; note = 2'-O-methyl modified nucleotide
  modified_base 14: mod_base = OTHER; note = 2'-fluoro modified nucleotide
  modified_base 15: mod_base = OTHER; note = 2'-O-methyl modified nucleotide
  modified_base 16: mod_base = OTHER; note = 2'-fluoro modified nucleotide
  modified_base 17: mod_base = OTHER; note = 2'-O-methyl modified nucleotide
  modified_base 18: mod_base = OTHER; note = 2'-O-methyl modified nucleotide
  modified_base 19: mod_base = OTHER; note = 2'-O-methyl modified nucleotide with thiophosphate linkage
  modified_base 20: mod_base = OTHER; note = 2'-O-methyl modified nucleotide with thiophosphate linkage
  modified_base 21: mod_base = OTHER; note = 2'-O-methyl modified nucleotide
ttccattaccatggtagcacc

SEQ ID NO: 498 - RNA, 21 nt, synthetic construct
  source 1..21: mol_type = other RNA
  modified_base 1: mod_base = OTHER; note = 2'-O-methyl modified nucleotide with thiophosphate linkage
  modified_base 2: mod_base = OTHER; note = 2'-fluoro modified nucleotide with thiophosphate linkage
  modified_base 3: mod_base = OTHER; note = 2'-O-methyl modified nucleotide
  modified_base 4: mod_base = OTHER; note = 2'-O-methyl modified nucleotide
  modified_base 5: mod_base = OTHER; note = 2'-fluoro modified nucleotide
  modified_base 6: mod_base = OTHER; note = 2'-O-methyl modified nucleotide
  modified_base 7: mod_base = OTHER; note = Unlocked nucleic acid
  modified_base 8: mod_base = OTHER; note = 2'-O-methyl modified nucleotide
  modified_base 9: mod_base = OTHER; note = 2'-O-methyl modified nucleotide
  modified_base 10: mod_base = OTHER; note = 2'-O-methyl modified nucleotide
  modified_base 11: mod_base = OTHER; note = 2'-O-methyl modified nucleotide
  modified_base 12: mod_base = OTHER; note = 2'-fluoro modified nucleotide
  modified_base 13: mod_base = OTHER; note = 2'-O-methyl modified nucleotide
  modified_base 14: mod_base = OTHER; note = 2'-fluoro modified nucleotide
  modified_base 15: mod_base = OTHER; note = 2'-O-methyl modified nucleotide
  modified_base 16: mod_base = OTHER; note = 2'-fluoro modified nucleotide
  modified_base 17: mod_base = OTHER; note = 2'-O-methyl modified nucleotide
  modified_base 18: mod_base = OTHER; note = 2'-O-methyl modified nucleotide
  modified_base 19: mod_base = OTHER; note = 2'-O-methyl modified nucleotide with thiophosphate linkage
  modified_base 20: mod_base = OTHER; note = 2'-O-methyl modified nucleotide with thiophosphate linkage
  modified_base 21: mod_base = OTHER; note = 2'-O-methyl modified nucleotide
tctctgtccattaccatggtc

SEQ ID NO: 499 - RNA, 21 nt, synthetic construct
  source 1..21: mol_type = other RNA
  modified_base 1: mod_base = OTHER; note = 2'-O-methyl modified nucleotide with thiophosphate linkage
  modified_base 2: mod_base = OTHER; note = 2'-fluoro modified nucleotide with thiophosphate linkage
  modified_base 3: mod_base = OTHER; note = 2'-O-methyl modified nucleotide
  modified_base 4: mod_base = OTHER; note = 2'-O-methyl modified nucleotide
  modified_base 5: mod_base = OTHER; note = 2'-O-methyl modified nucleotide
  modified_base 6: mod_base = OTHER; note = 2'-O-methyl modified nucleotide
  modified_base 7: mod_base = OTHER; note = 2'-fluoro modified nucleotide
  modified_base 8: mod_base = OTHER; note = 2'-O-methyl modified nucleotide
  modified_base 9: mod_base = OTHER; note = 2'-O-methyl modified nucleotide
  modified_base 10: mod_base = OTHER; note = 2'-O-methyl modified nucleotide
  modified_base 11: mod_base = OTHER; note = 2'-O-methyl modified nucleotide
  modified_base 12: mod_base = OTHER; note = 2'-fluoro modified nucleotide
  modified_base 13: mod_base = OTHER; note = 2'-O-methyl modified nucleotide
  modified_base 14: mod_base = OTHER; note = 2'-fluoro modified nucleotide
  modified_base 15: mod_base = OTHER; note = 2'-O-methyl modified nucleotide
  modified_base 16: mod_base = OTHER; note = 2'-fluoro modified nucleotide
  modified_base 17: mod_base = OTHER; note = 2'-O-methyl modified nucleotide
  modified_base 18: mod_base = OTHER; note = 2'-O-methyl modified nucleotide
  modified_base 19: mod_base = OTHER; note = 2'-O-methyl modified nucleotide with thiophosphate linkage
  modified_base 20: mod_base = OTHER; note = 2'-O-methyl modified nucleotide with thiophosphate linkage
  modified_base 21: mod_base = OTHER; note = 2'-O-methyl modified nucleotide
tataactctgtccattaccac

SEQ ID NO: 500 - RNA, 21 nt, synthetic construct
  source 1..21: mol_type = other RNA
  modified_base 1: mod_base = OTHER; note = 2'-O-methyl modified nucleotide with thiophosphate linkage
  modified_base 2: mod_base = OTHER; note = 2'-fluoro modified nucleotide with thiophosphate linkage
  modified_base 3: mod_base = OTHER; note = 2'-O-methyl modified nucleotide
  modified_base 4: mod_base = OTHER; note = 2'-O-methyl modified nucleotide
  modified_base 5: mod_base = OTHER; note = 2'-O-methyl modified nucleotide
  modified_base 6: mod_base = OTHER; note = 2'-O-methyl modified nucleotide
  modified_base 7: mod_base = OTHER; note = 2'-fluoro modified nucleotide
  modified_base 8: mod_base = OTHER; note = 2'-O-methyl modified nucleotide
  modified_base 9: mod_base = OTHER; note = 2'-O-methyl modified nucleotide
  modified_base 10: mod_base = OTHER; note = 2'-O-methyl modified nucleotide
  modified_base 11: mod_base = OTHER; note = 2'-O-methyl modified nucleotide
  modified_base 12: mod_base = OTHER; note = 2'-fluoro modified nucleotide
  modified_base 13: mod_base = OTHER; note = 2'-O-methyl modified nucleotide
  modified_base 14: mod_base = OTHER; note = 2'-fluoro modified nucleotide
  modified_base 15: mod_base = OTHER; note = 2'-O-methyl modified nucleotide
  modified_base 16: mod_base = OTHER; note = 2'-fluoro modified nucleotide
  modified_base 17: mod_base = OTHER; note = 2'-O-methyl modified nucleotide
  modified_base 18: mod_base = OTHER; note = 2'-O-methyl modified nucleotide
  modified_base 19: mod_base = OTHER; note = 2'-O-methyl modified nucleotide with thiophosphate linkage
  modified_base 20: mod_base = OTHER; note = 2'-O-methyl modified nucleotide with thiophosphate linkage
  modified_base 21: mod_base = OTHER; note = 2'-O-methyl modified nucleotide
ttatgtgcctcgataactctc

SEQ ID NO: 501 - RNA, 21 nt, synthetic construct
  source 1..21: mol_type = other RNA
  modified_base 1: mod_base = OTHER; note = 2'-O-methyl modified nucleotide with thiophosphate linkage
  modified_base 2: mod_base = OTHER; note = 2'-fluoro modified nucleotide with thiophosphate linkage
  modified_base 3: mod_base = OTHER; note = 2'-O-methyl modified nucleotide
  modified_base 4: mod_base = OTHER; note = 2'-O-methyl modified nucleotide
  modified_base 5: mod_base = OTHER; note = 2'-O-methyl modified nucleotide
  modified_base 6: mod_base = OTHER; note = 2'-O-methyl modified nucleotide
  modified_base 7: mod_base = OTHER; note = 2'-fluoro modified nucleotide
  modified_base 8: mod_base = OTHER; note = 2'-O-methyl modified nucleotide
  modified_base 9: mod_base = OTHER; note = 2'-O-methyl modified nucleotide
  modified_base 10: mod_base = OTHER; note = 2'-O-methyl modified nucleotide
  modified_base 11: mod_base = OTHER; note = 2'-O-methyl modified nucleotide
  modified_base 12: mod_base = OTHER; note = 2'-fluoro modified nucleotide
  modified_base 13: mod_base = OTHER; note = 2'-O-methyl modified nucleotide
  modified_base 14: mod_base = OTHER; note = 2'-fluoro modified nucleotide
  modified_base 15: mod_base = OTHER; note = 2'-O-methyl modified nucleotide
  modified_base 16: mod_base = OTHER; note = 2'-fluoro modified nucleotide
  modified_base 17: mod_base = OTHER; note = 2'-O-methyl modified nucleotide
  modified_base 18: mod_base = OTHER; note = 2'-O-methyl modified nucleotide
  modified_base 19: mod_base = OTHER; note = 2'-O-methyl modified nucleotide with thiophosphate linkage
  modified_base 20: mod_base = OTHER; note = 2'-O-methyl modified nucleotide with thiophosphate linkage
  modified_base 21: mod_base = OTHER; note = 2'-O-methyl modified nucleotide
tttgataactctgtccatttg

SEQ ID NO: 502 - RNA, 21 nt, synthetic construct
  source 1..21: mol_type = other RNA
  modified_base 1: mod_base = OTHER; note = 2'-O-methyl modified nucleotide with thiophosphate linkage
  modified_base 2: mod_base = OTHER; note = 2'-fluoro modified nucleotide with thiophosphate linkage
  modified_base 3: mod_base = OTHER; note = 2'-O-methyl modified nucleotide
  modified_base 4: mod_base = OTHER; note = 2'-O-methyl modified nucleotide
  modified_base 5: mod_base = OTHER; note = 2'-fluoro modified nucleotide
  modified_base 6: mod_base = OTHER; note = 2'-O-methyl modified nucleotide
  modified_base 7: mod_base = OTHER; note = Unlocked nucleic acid
  modified_base 8: mod_base = OTHER; note = 2'-O-methyl modified nucleotide
  modified_base 9: mod_base = OTHER; note = 2'-O-methyl modified nucleotide
  modified_base 10: mod_base = OTHER; note = 2'-O-methyl modified nucleotide
  modified_base 11: mod_base = OTHER; note = 2'-O-methyl modified nucleotide
  modified_base 12: mod_base = OTHER; note = 2'-fluoro modified nucleotide
  modified_base 13: mod_base = OTHER; note = 2'-O-methyl modified nucleotide
  modified_base 14: mod_base = OTHER; note = 2'-fluoro modified nucleotide
  modified_base 15: mod_base = OTHER; note = 2'-O-methyl modified nucleotide
  modified_base 16: mod_base = OTHER; note = 2'-fluoro modified nucleotide
  modified_base 17: mod_base = OTHER; note = 2'-O-methyl modified nucleotide
  modified_base 18: mod_base = OTHER; note = 2'-O-methyl modified nucleotide
  modified_base 19: mod_base = OTHER; note = 2'-O-methyl modified nucleotide with thiophosphate linkage
  modified_base 20: mod_base = OTHER; note = 2'-O-methyl modified nucleotide with thiophosphate linkage
  modified_base 21: mod_base = OTHER; note = 2'-O-methyl modified nucleotide
ttgccttgataactctgtccc

SEQ ID NO: 503 - RNA, 21 nt, synthetic construct
  source 1..21: mol_type = other RNA
  modified_base 1: mod_base = OTHER; note = 2'-O-methyl modified nucleotide with thiophosphate linkage
  modified_base 2: mod_base = OTHER; note = 2'-fluoro modified nucleotide with thiophosphate linkage
  modified_base 3: mod_base = OTHER; note = 2'-O-methyl modified nucleotide
  modified_base 4: mod_base = OTHER; note = 2'-O-methyl modified nucleotide
  modified_base 5: mod_base = OTHER; note = 2'-O-methyl modified nucleotide
  modified_base 6: mod_base = OTHER; note = 2'-O-methyl modified nucleotide
  modified_base 7: mod_base = OTHER; note = 2'-fluoro modified nucleotide
  modified_base 8: mod_base = OTHER; note = 2'-O-methyl modified nucleotide
  modified_base 9: mod_base = OTHER; note = 2'-O-methyl modified nucleotide
  modified_base 10: mod_base = OTHER; note = 2'-O-methyl modified nucleotide
  modified_base 11: mod_base = OTHER; note = 2'-O-methyl modified nucleotide
  modified_base 12: mod_base = OTHER; note = 2'-fluoro modified nucleotide
  modified_base 13: mod_base = OTHER; note = 2'-O-methyl modified nucleotide
  modified_base 14: mod_base = OTHER; note = 2'-fluoro modified nucleotide
  modified_base 15: mod_base = OTHER; note = 2'-O-methyl modified nucleotide
  modified_base 16: mod_base = OTHER; note = 2'-fluoro modified nucleotide
  modified_base 17: mod_base = OTHER; note = 2'-O-methyl modified nucleotide
  modified_base 18: mod_base = OTHER; note = 2'-O-methyl modified nucleotide
  modified_base 19: mod_base = OTHER; note = 2'-O-methyl modified nucleotide with thiophosphate linkage
  modified_base 20: mod_base = OTHER; note = 2'-O-methyl modified nucleotide with thiophosphate linkage
  modified_base 21: mod_base = OTHER; note = 2'-O-methyl modified nucleotide
tagttgcaaggacacttgatc

SEQ ID NO: 504 - RNA, 21 nt, synthetic construct
  source 1..21: mol_type = other RNA
  modified_base 1: mod_base = OTHER; note = 2'-O-methyl modified nucleotide with thiophosphate linkage
  modified_base 2: mod_base = OTHER; note = 2'-fluoro modified nucleotide with thiophosphate linkage
  modified_base 3: mod_base = OTHER; note = 2'-O-methyl modified nucleotide
  modified_base 4: mod_base = OTHER; note = 2'-O-methyl modified nucleotide
  modified_base 5: mod_base = OTHER; note = 2'-fluoro modified nucleotide
  modified_base 6: mod_base = OTHER; note = 2'-O-methyl modified nucleotide
  modified_base 7: mod_base = OTHER; note = Unlocked nucleic acid
  modified_base 8: mod_base = OTHER; note = 2'-O-methyl modified nucleotide
  modified_base 9: mod_base = OTHER; note = 2'-O-methyl modified nucleotide
  modified_base 10: mod_base = OTHER; note = 2'-O-methyl modified nucleotide
  modified_base 11: mod_base = OTHER; note = 2'-O-methyl modified nucleotide
  modified_base 12: mod_base = OTHER; note = 2'-fluoro modified nucleotide
  modified_base 13: mod_base = OTHER; note = 2'-O-methyl modified nucleotide
  modified_base 14: mod_base = OTHER; note = 2'-fluoro modified nucleotide
  modified_base 15: mod_base = OTHER; note = 2'-O-methyl modified nucleotide
  modified_base 16: mod_base = OTHER; note = 2'-fluoro modified nucleotide
  modified_base 17: mod_base = OTHER; note = 2'-O-methyl modified nucleotide
  modified_base 18: mod_base = OTHER; note = 2'-O-methyl modified nucleotide
  modified_base 19: mod_base = OTHER; note = 2'-O-methyl modified nucleotide with thiophosphate linkage
  modified_base 20: mod_base = OTHER; note = 2'-O-methyl modified nucleotide with thiophosphate linkage
  modified_base 21: mod_base = OTHER; note = 2'-O-methyl modified nucleotide
ttggtagcaatcctggacccg

SEQ ID NO: 505 - RNA, 21 nt, synthetic construct
  source 1..21: mol_type = other RNA
  modified_base 1: mod_base = OTHER; note = 2'-O-methyl modified nucleotide with thiophosphate linkage
  modified_base 2: mod_base = OTHER; note = 2'-fluoro modified nucleotide with thiophosphate linkage
  modified_base 3: mod_base = OTHER; note = 2'-O-methyl modified nucleotide
  modified_base 4: mod_base = OTHER; note = 2'-O-methyl modified nucleotide
  modified_base 5: mod_base = OTHER; note = 2'-O-methyl modified nucleotide
  modified_base 6: mod_base = OTHER; note = 2'-O-methyl modified nucleotide
  modified_base 7: mod_base = OTHER; note = 2'-fluoro modified nucleotide
  modified_base 8: mod_base = OTHER; note = 2'-O-methyl modified nucleotide
  modified_base 9: mod_base = OTHER; note = 2'-O-methyl modified nucleotide
  modified_base 10: mod_base = OTHER; note = 2'-O-methyl modified nucleotide
  modified_base 11: mod_base = OTHER; note = 2'-O-methyl modified nucleotide
  modified_base 12: mod_base = OTHER; note = 2'-fluoro modified nucleotide
  modified_base 13: mod_base = OTHER; note = 2'-O-methyl modified nucleotide
  modified_base 14: mod_base = OTHER; note = 2'-fluoro modified nucleotide
  modified_base 15: mod_base = OTHER; note = 2'-O-methyl modified nucleotide
  modified_base 16: mod_base = OTHER; note = 2'-fluoro modified nucleotide
  modified_base 17: mod_base = OTHER; note = 2'-O-methyl modified nucleotide
  modified_base 18: mod_base = OTHER; note = 2'-O-methyl modified nucleotide
  modified_base 19: mod_base = OTHER; note = 2'-O-methyl modified nucleotide with thiophosphate linkage
  modified_base 20: mod_base = OTHER; note = 2'-O-methyl modified nucleotide with thiophosphate linkage
  modified_base 21: mod_base = OTHER; note = 2'-O-methyl modified nucleotide
tacatgtccttcctgtgacac

SEQ ID NO: 506 - RNA, 21 nt, synthetic construct
  source 1..21: mol_type = other RNA
  modified_base 1: mod_base = OTHER; note = 2'-O-methyl modified nucleotide with thiophosphate linkage
  modified_base 2: mod_base = OTHER; note = 2'-fluoro modified nucleotide with thiophosphate linkage
  modified_base 3: mod_base = OTHER; note = 2'-O-methyl modified nucleotide
  modified_base 4: mod_base = OTHER; note = 2'-O-methyl modified nucleotide
  modified_base 5: mod_base = OTHER; note = 2'-O-methyl modified nucleotide
  modified_base 6: mod_base = OTHER; note = 2'-O-methyl modified nucleotide
  modified_base 7: mod_base = OTHER; note = 2'-fluoro modified nucleotide
  modified_base 8: mod_base = OTHER; note = 2'-O-methyl modified nucleotide
  modified_base 9: mod_base = OTHER; note = 2'-O-methyl modified nucleotide
  modified_base 10: mod_base = OTHER; note = 2'-O-methyl modified nucleotide
  modified_base 11: mod_base = OTHER; note = 2'-O-methyl modified nucleotide
  modified_base 12: mod_base = OTHER; note = 2'-fluoro modified nucleotide
  modified_base 13: mod_base = OTHER; note = 2'-O-methyl modified nucleotide
  modified_base 14: mod_base = OTHER; note = 2'-fluoro modified nucleotide
  modified_base 15: mod_base = OTHER; note = 2'-O-methyl modified nucleotide
  modified_base 16: mod_base = OTHER; note = 2'-fluoro modified nucleotide
  modified_base 17: mod_base = OTHER; note = 2'-O-methyl modified nucleotide
  modified_base 18: mod_base = OTHER; note = 2'-O-methyl modified nucleotide
  modified_base 19: mod_base = OTHER; note = 2'-O-methyl modified nucleotide with thiophosphate linkage
  modified_base 20: mod_base = OTHER; note = 2'-O-methyl modified nucleotide with thiophosphate linkage
  modified_base 21: mod_base = OTHER; note = 2'-O-methyl modified nucleotide
ttgattctgtcactggacatc

SEQ ID NO: 507 - RNA, 21 nt, synthetic construct
  source 1..21: mol_type = other RNA
  modified_base 1: mod_base = OTHER; note = 2'-O-methyl modified nucleotide with thiophosphate linkage
  modified_base 2: mod_base = OTHER; note = 2'-fluoro modified nucleotide with thiophosphate linkage
  modified_base 3: mod_base = OTHER; note = 2'-O-methyl modified nucleotide
  modified_base 4: mod_base = OTHER; note = 2'-O-methyl modified nucleotide
  modified_base 5: mod_base = OTHER; note = 2'-O-methyl modified nucleotide
  modified_base 6: mod_base = OTHER; note = 2'-O-methyl modified nucleotide
  modified_base 7: mod_base = OTHER; note = 2'-fluoro modified nucleotide
  modified_base 8: mod_base = OTHER; note = 2'-O-methyl modified nucleotide
  modified_base 9: mod_base = OTHER; note = 2'-O-methyl modified nucleotide
  modified_base 10: mod_base = OTHER; note = 2'-O-methyl modified nucleotide
  modified_base 11: mod_base = OTHER; note = 2'-O-methyl modified nucleotide
  modified_base 12: mod_base = OTHER; note = 2'-fluoro modified nucleotide
  modified_base 13: mod_base = OTHER; note = 2'-O-methyl modified nucleotide
  modified_base 14: mod_base = OTHER; note = 2'-fluoro modified nucleotide
  modified_base 15: mod_base = OTHER; note = 2'-O-methyl modified nucleotide
  modified_base 16: mod_base = OTHER; note = 2'-fluoro modified nucleotide
  modified_base 17: mod_base = OTHER; note = 2'-O-methyl modified nucleotide
  modified_base 18: mod_base = OTHER; note = 2'-O-methyl modified nucleotide
  modified_base 19: mod_base = OTHER; note = 2'-O-methyl modified nucleotide with thiophosphate linkage
  modified_base 20: mod_base = OTHER; note = 2'-O-methyl modified nucleotide with thiophosphate linkage
  modified_base 21: mod_base = OTHER; note = 2'-O-methyl modified nucleotide
ttgttcagaaggagcctctgc

SEQ ID NO: 508 - RNA, 21 nt, synthetic construct
  source 1..21: mol_type = other RNA
  modified_base 1: mod_base = OTHER; note = 2'-O-methyl modified nucleotide with thiophosphate linkage
  modified_base 2: mod_base = OTHER; note = 2'-fluoro modified nucleotide with thiophosphate linkage
  modified_base 3: mod_base = OTHER; note = 2'-O-methyl modified nucleotide
  modified_base 4: mod_base = OTHER; note = 2'-O-methyl modified nucleotide
  modified_base 5: mod_base = OTHER; note = 2'-O-methyl modified nucleotide
  modified_base 6: mod_base = OTHER; note = 2'-O-methyl modified nucleotide
  modified_base 7: mod_base = OTHER; note = 2'-fluoro modified nucleotide
  modified_base 8: mod_base = OTHER; note = 2'-O-methyl modified nucleotide
  modified_base 9: mod_base = OTHER; note = 2'-O-methyl modified nucleotide
  modified_base 10: mod_base = OTHER; note = 2'-O-methyl modified nucleotide
  modified_base 11: mod_base = OTHER; note = 2'-O-methyl modified nucleotide
  modified_base 12: mod_base = OTHER; note = 2'-fluoro modified nucleotide
  modified_base 13: mod_base = OTHER; note = 2'-O-methyl modified nucleotide
  modified_base 14: mod_base = OTHER; note = 2'-fluoro modified nucleotide
  modified_base 15: mod_base = OTHER; note = 2'-O-methyl modified nucleotide
  modified_base 16: mod_base = OTHER; note = 2'-fluoro modified nucleotide
  modified_base 17: mod_base = OTHER; note = 2'-O-methyl modified nucleotide
  modified_base 18: mod_base = OTHER; note = 2'-O-methyl modified nucleotide
  modified_base 19: mod_base = OTHER; note = 2'-O-methyl modified nucleotide with thiophosphate linkage
  modified_base 20: mod_base = OTHER; note = 2'-O-methyl modified nucleotide with thiophosphate linkage
  modified_base 21: mod_base = OTHER; note = 2'-O-methyl modified nucleotide
tcctcgataactctgtccatg

SEQ ID NO: 509 - RNA, 21 nt, synthetic construct
  source 1..21: mol_type = other RNA
  modified_base 1: mod_base = OTHER; note = 2'-O-methyl modified nucleotide with thiophosphate linkage
  modified_base 2: mod_base = OTHER; note = 2'-fluoro modified nucleotide with thiophosphate linkage
  modified_base 3: mod_base = OTHER; note = 2'-O-methyl modified nucleotide
  modified_base 4: mod_base = OTHER; note = 2'-O-methyl modified nucleotide
  modified_base 5: mod_base = OTHER; note = 2'-O-methyl modified nucleotide
  modified_base 6: mod_base = OTHER; note = 2'-O-methyl modified nucleotide
  modified_base 7: mod_base = OTHER; note = 2'-fluoro modified nucleotide
  modified_base 8: mod_base = OTHER; note = 2'-O-methyl modified nucleotide
  modified_base 9: mod_base = OTHER; note = 2'-O-methyl modified nucleotide
  modified_base 10: mod_base = OTHER; note = 2'-O-methyl modified nucleotide
  modified_base 11: mod_base = OTHER; note = 2'-O-methyl modified nucleotide
  modified_base 12: mod_base = OTHER; note = 2'-fluoro modified nucleotide
  modified_base 13: mod_base = OTHER; note = 2'-O-methyl modified nucleotide
  modified_base 14: mod_base = OTHER; note = 2'-fluoro modified nucleotide
  modified_base 15: mod_base = OTHER; note = 2'-O-methyl modified nucleotide
  modified_base 16: mod_base = OTHER; note = 2'-fluoro modified nucleotide
  modified_base 17: mod_base = OTHER; note = 2'-O-methyl modified nucleotide
  modified_base 18: mod_base = OTHER; note = 2'-O-methyl modified nucleotide
  modified_base 19: mod_base = OTHER; note = 2'-O-methyl modified nucleotide with thiophosphate linkage
  modified_base 20: mod_base = OTHER; note = 2'-O-methyl modified nucleotide with thiophosphate linkage
  modified_base 21: mod_base = OTHER; note = 2'-O-methyl modified nucleotide
tctctgtccattaccatggtc

SEQ ID NO: 510 - RNA, 21 nt, synthetic construct
  source 1..21: mol_type = other RNA
  modified_base 1: mod_base = OTHER; note = 2'-O-methyl modified nucleotide with thiophosphate linkage
  modified_base 2: mod_base = OTHER; note = 2'-fluoro modified nucleotide with thiophosphate linkage
  modified_base 3: mod_base = OTHER; note = 2'-O-methyl modified nucleotide
  modified_base 4: mod_base = OTHER; note = 2'-O-methyl modified nucleotide
  modified_base 5: mod_base = OTHER; note = 2'-O-methyl modified nucleotide
  modified_base 6: mod_base = OTHER; note = 2'-O-methyl modified nucleotide
  modified_base 7: mod_base = OTHER; note = 2'-fluoro modified nucleotide
  modified_base 8: mod_base = OTHER; note = 2'-O-methyl modified nucleotide
  modified_base 9: mod_base = OTHER; note = 2'-O-methyl modified nucleotide
  modified_base 10: mod_base = OTHER; note = 2'-O-methyl modified nucleotide
  modified_base 11: mod_base = OTHER; note = 2'-O-methyl modified nucleotide
  modified_base 12: mod_base = OTHER; note = 2'-fluoro modified nucleotide
  modified_base 13: mod_base = OTHER; note = 2'-O-methyl modified nucleotide
  modified_base 14: mod_base = OTHER; note = 2'-fluoro modified nucleotide
  modified_base 15: mod_base = OTHER; note = 2'-O-methyl modified nucleotide
  modified_base 16: mod_base = OTHER; note = 2'-fluoro modified nucleotide
  modified_base 17: mod_base = OTHER; note = 2'-O-methyl modified nucleotide
  modified_base 18: mod_base = OTHER; note = 2'-O-methyl modified nucleotide
  modified_base 19: mod_base = OTHER; note = 2'-O-methyl modified nucleotide with thiophosphate linkage
  modified_base 20: mod_base = OTHER; note = 2'-O-methyl modified nucleotide with thiophosphate linkage
  modified_base 21: mod_base = OTHER; note = 2'-O-methyl modified nucleotide
ttgccttgataactctgtccc

SEQ ID NO: 511 - RNA, 21 nt, synthetic construct
  source 1..21: mol_type = other RNA
  modified_base 1: mod_base = OTHER; note = 2'-O-methyl modified nucleotide with thiophosphate linkage
  modified_base 2: mod_base = OTHER; note = 2'-fluoro modified nucleotide with thiophosphate linkage
  modified_base 3: mod_base = OTHER; note = 2'-O-methyl modified nucleotide
  modified_base 4: mod_base = OTHER; note = 2'-O-methyl modified nucleotide
  modified_base 5: mod_base = OTHER; note = 2'-O-methyl modified nucleotide
  modified_base 6: mod_base = OTHER; note = 2'-O-methyl modified nucleotide
  modified_base 7: mod_base = OTHER; note = 2'-fluoro modified nucleotide
  modified_base 8: mod_base = OTHER; note = 2'-O-methyl modified nucleotide
  modified_base 9: mod_base = OTHER; note = 2'-O-methyl modified nucleotide
  modified_base 10: mod_base = OTHER; note = 2'-O-methyl modified nucleotide
  modified_base 11: mod_base = OTHER; note = 2'-O-methyl modified nucleotide
  modified_base 12: mod_base = OTHER; note = 2'-fluoro modified nucleotide
  modified_base 13: mod_base = OTHER; note = 2'-O-methyl modified nucleotide
  modified_base 14: mod_base = OTHER; note = 2'-fluoro modified nucleotide
  modified_base 15: mod_base = OTHER; note = 2'-O-methyl modified nucleotide
  modified_base 16: mod_base = OTHER; note = 2'-fluoro modified nucleotide
  modified_base 17: mod_base = OTHER; note = 2'-O-methyl modified nucleotide
  modified_base 18: mod_base = OTHER; note = 2'-O-methyl modified nucleotide
  modified_base 19: mod_base = OTHER; note = 2'-O-methyl modified nucleotide with thiophosphate linkage
  modified_base 20: mod_base = OTHER; note = 2'-O-methyl modified nucleotide with thiophosphate linkage
  modified_base 21: mod_base = OTHER; note = 2'-O-methyl modified nucleotide
ttggtagcaatcctggacccg

SEQ ID NO: 512 - RNA, 21 nt, synthetic construct
  source 1..21: mol_type = other RNA
  modified_base 1: mod_base = OTHER; note = 2'-O-methyl modified nucleotide with thiophosphate linkage
  modified_base 2: mod_base = OTHER; note = 2'-fluoro modified nucleotide with thiophosphate linkage
  modified_base 3: mod_base = OTHER; note = 2'-O-methyl modified nucleotide
  modified_base 4: mod_base = OTHER; note = 2'-O-methyl modified nucleotide
  modified_base 5: mod_base = OTHER; note = 2'-O-methyl modified nucleotide
  modified_base 6: mod_base = OTHER; note = 2'-O-methyl modified nucleotide
  modified_base 7: mod_base = OTHER; note = 2'-fluoro modified nucleotide
  modified_base 8: mod_base = OTHER; note = 2'-O-methyl modified nucleotide
  modified_base 9: mod_base = OTHER; note = 2'-O-methyl modified nucleotide
  modified_base 10: mod_base = OTHER; note = 2'-O-methyl modified nucleotide
  modified_base 11: mod_base = OTHER; note = 2'-O-methyl modified nucleotide
  modified_base 12: mod_base = OTHER; note = 2'-fluoro modified nucleotide
  modified_base 13: mod_base = OTHER; note = 2'-O-methyl modified nucleotide
  modified_base 14: mod_base = OTHER; note = 2'-fluoro modified nucleotide
  modified_base 15: mod_base = OTHER; note = 2'-O-methyl modified nucleotide
  modified_base 16: mod_base = OTHER; note = 2'-fluoro modified nucleotide
  modified_base 17: mod_base = OTHER; note = 2'-O-methyl modified nucleotide
  modified_base 18: mod_base = OTHER; note = 2'-O-methyl modified nucleotide
  modified_base 19: mod_base = OTHER; note = 2'-O-methyl modified nucleotide with thiophosphate linkage
  modified_base 20: mod_base = OTHER; note = 2'-O-methyl modified nucleotide with thiophosphate linkage
  modified_base 21: mod_base = OTHER; note = 2'-O-methyl modified nucleotide
tagatgaccaagcttggcaac

SEQ ID NO: 513 - RNA, 21 nt, synthetic construct
  source 1..21: mol_type = other RNA
  modified_base 1: mod_base = OTHER; note = 2'-O-methyl modified nucleotide with thiophosphate linkage
  modified_base 2: mod_base = OTHER; note = 2'-fluoro modified nucleotide with thiophosphate linkage
  modified_base 3: mod_base = OTHER; note = 2'-O-methyl modified nucleotide
  modified_base 4: mod_base = OTHER; note = 2'-O-methyl modified nucleotide
  modified_base 5: mod_base = OTHER; note = 2'-O-methyl modified nucleotide
  modified_base 6: mod_base = OTHER; note = 2'-O-methyl modified nucleotide
  modified_base 7: mod_base = OTHER; note = 2'-fluoro modified nucleotide
  modified_base 8: mod_base = OTHER; note = 2'-O-methyl modified nucleotide
  modified_base 9: mod_base = OTHER; note = 2'-O-methyl modified nucleotide
  modified_base 10: mod_base = OTHER; note = 2'-O-methyl modified nucleotide
  modified_base 11: mod_base = OTHER; note = 2'-O-methyl modified nucleotide
  modified_base 12: mod_base = OTHER; note = 2'-fluoro modified nucleotide
  modified_base 13: mod_base = OTHER; note = 2'-O-methyl modified nucleotide
  modified_base 14: mod_base = OTHER; note = 2'-fluoro modified nucleotide
  modified_base 15: mod_base = OTHER; note = 2'-O-methyl modified nucleotide
  modified_base 16: mod_base = OTHER; note = 2'-fluoro modified nucleotide
  modified_base 17: mod_base = OTHER; note = 2'-O-methyl modified nucleotide
  modified_base 18: mod_base = OTHER; note = 2'-O-methyl modified nucleotide
  modified_base 19: mod_base = OTHER; note = 2'-O-methyl modified nucleotide with thiophosphate linkage
  modified_base 20: mod_base = OTHER; note = 2'-O-methyl modified nucleotide with thiophosphate linkage
  modified_base 21: mod_base = OTHER; note = 2'-O-methyl modified nucleotide
tgataactctgtccatttccc

SEQ ID NO: 514 - RNA, 21 nt, synthetic construct
  source 1..21: mol_type = other RNA
gatggacagagttatcgaggt

SEQ ID NO: 515 - RNA, 21 nt, synthetic construct
  source 1..21: mol_type = other RNA
gagagttatcgaggcacataa

SEQ ID NO: 516 - RNA, 21 nt, synthetic construct
  source 1..21: mol_type = other RNA
gagagttatcgaggcacatat

SEQ ID NO: 517 - RNA, 21 nt, synthetic construct
  source 1..21: mol_type = other RNA
gagagttatcgaggcacatac

SEQ ID NO: 518 - RNA, 21 nt, synthetic construct
  source 1..21: mol_type = other RNA
gagagttatcgaggcacatag

SEQ ID NO: 519 - RNA, 17 nt, synthetic construct
  source 1..17: mol_type = other RNA
gttatcgaggcacataa

SEQ ID NO: 520 - RNA, 18 nt, synthetic construct
  source 1..18: mol_type = other RNA
agttatcgaggcacataa

SEQ ID NO: 521 - RNA, 19 nt, synthetic construct
  source 1..19: mol_type = other RNA
aagttatcgaggcacataa

SEQ ID NO: 522 - RNA, 19 nt, synthetic construct
  source 1..19: mol_type = other RNA
tagttatcgaggcacataa

SEQ ID NO: 523 - RNA, 19 nt, synthetic construct
  source 1..19: mol_type = other RNA
gagttatcgaggcacataa

SEQ ID NO: 524 - RNA, 19 nt, synthetic construct
  source 1..19: mol_type = other RNA
cagttatcgaggcacataa

SEQ ID NO: 525 - RNA, 20 nt, synthetic construct
  source 1..20: mol_type = other RNA
agagttatcgaggcacataa

SEQ ID NO: 526 - RNA, 20 nt, synthetic construct
  source 1..20: mol_type = other RNA
tgagttatcgaggcacataa

SEQ ID NO: 527 - RNA, 20 nt, synthetic construct
  source 1..20: mol_type = other RNA
ggagttatcgaggcacataa

SEQ ID NO: 528 - RNA, 20 nt, synthetic construct
  source 1..20: mol_type = other RNA
cgagttatcgaggcacataa

SEQ ID NO: 529 - RNA, 21 nt, synthetic construct
  source 1..21: mol_type = other RNA
tagagttatcgaggcacataa

SEQ ID NO: 530 - RNA, 21 nt, synthetic construct
  source 1..21: mol_type = other RNA
cagagttatcgaggcacataa

SEQ ID NO: 531 - RNA, 21 nt, synthetic construct
  source 1..21: mol_type = other RNA
aagagttatcgaggcacataa

SEQ ID NO: 532 - RNA, 22 nt, synthetic construct
  source 1..22: mol_type = other RNA
acagagttatcgaggcacataa

SEQ ID NO: 533 - RNA, 23 nt, synthetic construct
  source 1..23: mol_type = other RNA
gacagagttatcgaggcacataa

SEQ ID NO: 534 - RNA, 24 nt, synthetic construct
  source 1..24: mol_type = other RNA
ggacagagttatcgaggcacataa

SEQ ID NO: 535 - RNA, 25 nt, synthetic construct
  source 1..25: mol_type = other RNA
tggacagagttatcgaggcacataa

SEQ ID NO: 536 - RNA, 26 nt, synthetic construct
  source 1..26: mol_type = other RNA
atggacagagttatcgaggcacataa

SEQ ID NO: 537 - RNA, 32 nt, synthetic construct
  source 1..32: mol_type = other RNA
atggtaatggacagagttatcgaggcacataa

SEQ ID NO: 538 - RNA, 21 nt, synthetic construct
  source 1..21: mol_type = other RNA
gagagttatcgaggcacataa

SEQ ID NO: 539 - RNA, 21 nt, synthetic construct
  source 1..21: mol_type = other RNA
gagagttatcgaggcacataa

SEQ ID NO: 540 - RNA, 21 nt, synthetic construct
  source 1..21: mol_type = other RNA
gagagttatcgaggcacataa

SEQ ID NO: 541 - RNA, 21 nt, synthetic construct
  source 1..21: mol_type = other RNA
gagagttatcgaggcacataa

SEQ ID NO: 542 - RNA, 21 nt, synthetic construct
  source 1..21: mol_type = other RNA
gagagttatcgaggcacataa

SEQ ID NO: 543 - RNA, 21 nt, synthetic construct
  source 1..21: mol_type = other RNA
gagagttatcgaggcgcataa

SEQ ID NO: 544 - RNA, 21 nt, synthetic construct
  source 1..21: mol_type = other RNA
gagagttatcgaggcacatta

SEQ ID NO: 545 - RNA, 21 nt, synthetic construct
  source 1..21: mol_type = other RNA
gagagttatcgaggcacataa

SEQ ID NO: 546 - RNA, 21 nt, synthetic construct
  source 1..21: mol_type = other RNA
gttgccaagcttggtcatcta

SEQ ID NO: 547 - RNA, 21 nt, synthetic construct
  source 1..21: mol_type = other RNA
gttgccaagcttggtcatctt

SEQ ID NO: 548 - RNA, 21 nt, synthetic construct
  source 1..21: mol_type = other RNA
gttgccaagcttggtcatctc

SEQ ID NO: 549 - RNA, 21 nt, synthetic construct
  source 1..21: mol_type = other RNA
gttgccaagcttggtcatctg

SEQ ID NO: 550 - RNA, 17 nt, synthetic construct
  source 1..17: mol_type = other RNA
ccaagcttggtcatcta

SEQ ID NO: 551 - RNA, 18 nt, synthetic construct
  source 1..18: mol_type = other RNA
gccaagcttggtcatcta

SEQ ID NO: 552 - RNA, 19 nt, synthetic construct
  source 1..19: mol_type = other RNA
agccaagcttggtcatcta

SEQ ID NO: 553 - RNA, 19 nt, synthetic construct
  source 1..19: mol_type = other RNA
tgccaagcttggtcatcta

SEQ ID NO: 554 - RNA, 19 nt, synthetic construct
  source 1..19: mol_type = other RNA
ggccaagcttggtcatcta

SEQ ID NO: 555 - RNA, 19 nt, synthetic construct
  source 1..19: mol_type = other RNA
cgccaagcttggtcatcta

SEQ ID NO: 556 - RNA, 20 nt, synthetic construct
  source 1..20: mol_type = other RNA
atgccaagcttggtcatcta

SEQ ID NO: 557 - RNA, 20 nt, synthetic construct
  source 1..20: mol_type = other RNA
ttgccaagcttggtcatcta

SEQ ID NO: 558 - RNA, 20 nt, synthetic construct
  source 1..20: mol_type = other RNA
gtgccaagcttggtcatcta

SEQ ID NO: 559 - RNA, 20 nt, synthetic construct
  source 1..20: mol_type = other RNA
ctgccaagcttggtcatcta

SEQ ID NO: 560 - RNA, 21 nt, synthetic construct
  source 1..21: mol_type = other RNA
tttgccaagcttggtcatcta

SEQ ID NO: 561 - RNA, 21 nt, synthetic construct
  source 1..21: mol_type = other RNA
cttgccaagcttggtcatcta

SEQ ID NO: 562 - RNA, 21 nt, synthetic construct
  source 1..21: mol_type = other RNA
attgccaagcttggtcatcta

SEQ ID NO: 563 - RNA, 22 nt, synthetic construct
  source 1..22: mol_type = other RNA
acttgccaagcttggtcatcta

SEQ ID NO: 564 - RNA, 23 nt, synthetic construct
  source 1..23: mol_type = other RNA
aacttgccaagcttggtcatcta

SEQ ID NO: 565 - RNA, 24 nt, synthetic construct
  source 1..24: mol_type = other RNA
gaacttgccaagcttggtcatcta

SEQ ID NO: 566 - RNA, 25 nt, synthetic construct
  source 1..25: mol_type = other RNA
agaacttgccaagcttggtcatcta

SEQ ID NO: 567 - RNA, 26 nt, synthetic construct
  source 1..26: mol_type = other RNA
aagaacttgccaagcttggtcatcta

SEQ ID NO: 568 - RNA, 32 nt, synthetic construct
  source 1..32: mol_type = other RNA
cacaggaagaacttgccaagcttggtcatcta

SEQ ID NO: 569 - RNA, 21 nt, synthetic construct
  source 1..21: mol_type = other RNA
gttgccaagcttggtcatcta

SEQ ID NO: 570 - RNA, 21 nt, synthetic construct
  source 1..21: mol_type = other RNA
gttgccaagcttggtcatcta

SEQ ID NO: 571 - RNA, 21 nt, synthetic construct
  source 1..21: mol_type = other RNA
gttgccaagcttggtcatcta

SEQ ID NO: 572 - RNA, 21 nt, synthetic construct
  source 1..21: mol_type = other RNA
gttgccaagcttggtcatcta

SEQ ID NO: 573 - RNA, 21 nt, synthetic construct
  source 1..21: mol_type = other RNA
gttgccaagcttggtcatcta

SEQ ID NO: 574 - RNA, 21 nt, synthetic construct
  source 1..21: mol_type = other RNA
gttgccaagcttggttatcta

SEQ ID NO: 575 - RNA, 21 nt, synthetic construct
  source 1..21: mol_type = other RNA
gttgccaagcttggtcatcca

SEQ ID NO: 576 - RNA, 21 nt, synthetic construct
  source 1..21: mol_type = other RNA
gttgccaagcttggtcatcta

SEQ ID NO: 577 - RNA, 21 nt, synthetic construct
  source 1..21: mol_type = other RNA
catggacagagttatcgagga

SEQ ID NO: 578 - RNA, 21 nt, synthetic construct
  source 1..21: mol_type = other RNA
catggacagagttatcgaggt

SEQ ID NO: 579 - RNA, 21 nt, synthetic construct
  source 1..21: mol_type = other RNA
catggacagagttatcgaggc

SEQ ID NO: 580 - RNA, 21 nt, synthetic construct
  source 1..21: mol_type = other RNA
catggacagagttatcgaggg

SEQ ID NO: 581 - RNA, 17 nt, synthetic construct
  source 1..17: mol_type = other RNA
gacagagttatcgagga

SEQ ID NO: 582 - RNA, 18 nt, synthetic construct
  source 1..18: mol_type = other RNA
ggacagagttatcgagga

SEQ ID NO: 583 - RNA, 19 nt, synthetic construct
  source 1..19: mol_type = other RNA
aggacagagttatcgagga

SEQ ID NO: 584 - RNA, 19 nt, synthetic construct
  source 1..19: mol_type = other RNA
tggacagagttatcgagga

SEQ ID NO: 585 - RNA, 19 nt, synthetic construct
  source 1..19: mol_type = other RNA
gggacagagttatcgagga

SEQ ID NO: 586 - RNA, 19 nt, synthetic construct
  source 1..19: mol_type = other RNA
cggacagagttatcgagga

SEQ ID NO: 587 - RNA, 20 nt, synthetic construct
  source 1..20: mol_type = other RNA
atggacagagttatcgagga

SEQ ID NO: 588 - RNA, 20 nt, synthetic construct
  source 1..20: mol_type = other RNA
ttggacagagttatcgagga

SEQ ID NO: 589 - RNA, 20 nt, synthetic construct
  source 1..20: mol_type = other RNA
gtggacagagttatcgagga

SEQ ID NO: 590 - RNA, 20 nt, synthetic construct
  source 1..20: mol_type = other RNA
ctggacagagttatcgagga

SEQ ID NO: 591 - RNA, 21 nt, synthetic construct
  source 1..21: mol_type = other RNA
tatggacagagttatcgagga

SEQ ID NO: 592 - RNA, 21 nt, synthetic construct
  source 1..21: mol_type = other RNA
gatggacagagttatcgagga

SEQ ID NO: 593 - RNA, 21 nt, synthetic construct
  source 1..21: mol_type = other RNA
aatggacagagttatcgagga

SEQ ID NO: 594 - RNA, 22 nt, synthetic construct
  source 1..22: mol_type = other RNA
tgatggacagagttatcgagga

SEQ ID NO: 595 - RNA, 23 nt, synthetic construct
  source 1..23: mol_type = other RNA
gtgatggacagagttatcgagga

SEQ ID NO: 596 - RNA, 24 nt, synthetic construct
  source 1..24: mol_type = other RNA
ggtgatggacagagttatcgagga

SEQ ID NO: 597 - RNA, 25 nt, synthetic construct
  source 1..25: mol_type = other RNA
tggtgatggacagagttatcgagga

SEQ ID NO: 598 - RNA, 26 nt, synthetic construct
  source 1..26: mol_type = other RNA
atggtgatggacagagttatcgagga

SEQ ID NO: 599 - RNA, 32 nt, synthetic construct
  source 1..32: mol_type = other RNA
gctaccatggtgatggacagagttatcgagga

SEQ ID NO: 600 - RNA, 21 nt, synthetic construct
  source 1..21: mol_type = other RNA
catggacagagttatcgagga

SEQ ID NO: 601 - RNA, 21 nt, synthetic construct
  source 1..21: mol_type = other RNA
catggacagagttatcgagga

SEQ ID NO: 602 - RNA, 21 nt, synthetic construct
  source 1..21: mol_type = other RNA
catggacagagttatcgagga

SEQ ID NO: 603 - RNA, 21 nt, synthetic construct
  source 1..21: mol_type = other RNA
catggacagagttatcgagga

SEQ ID NO: 604 - RNA, 21 nt, synthetic construct
  source 1..21: mol_type = other RNA
catggacagagttatcgagga

SEQ ID NO: 605 - RNA, 21 nt, synthetic construct
  source 1..21: mol_type = other RNA
catggacagagttattgagga

SEQ ID NO: 606 - RNA, 21 nt, synthetic construct
  source 1..21: mol_type = other RNA
catggacagagttatcgagaa

SEQ ID NO: 607 - RNA, 21 nt, synthetic construct
  source 1..21: mol_type = other RNA
catggacagagttatcgagga

SEQ ID NO: 608 - RNA, 21 nt, synthetic construct
  source 1..21: mol_type = other RNA
acctcgataactctgtccatc

SEQ ID NO: 609 - RNA, 21 nt, synthetic construct
  source 1..21: mol_type = other RNA
ttatgtgcctcgataactctc

SEQ ID NO: 610 - RNA, 21 nt, synthetic construct
  source 1..21: mol_type = other RNA
atatgtgcctcgataactctc

SEQ ID NO: 611 - RNA, 21 nt, synthetic construct
  source 1..21: mol_type = other RNA
gtatgtgcctcgataactctc

SEQ ID NO: 612 - RNA, 21 nt, synthetic construct
  source 1..21: mol_type = other RNA
ctatgtgcctcgataactctc

SEQ ID NO: 613 - RNA, 17 nt, synthetic construct
  source 1..17: mol_type = other RNA
ttatgtgcctcgataac

SEQ ID NO: 614 - RNA, 18 nt, synthetic construct
  source 1..18: mol_type = other RNA
ttatgtgcctcgataact

SEQ ID NO: 615 - RNA, 19 nt, synthetic construct
  source 1..19: mol_type = other RNA
ttatgtgcctcgataactt

SEQ ID NO: 616 - RNA, 19 nt, synthetic construct
  source 1..19: mol_type = other RNA
ttatgtgcctcgataacta

SEQ ID NO: 617 - RNA, 19 nt, synthetic construct
  source 1..19: mol_type = other RNA
ttatgtgcctcgataactc

SEQ ID NO: 618 - RNA, 19 nt, synthetic construct
  source 1..19: mol_type = other RNA
ttatgtgcctcgataactg

SEQ ID NO: 619 - RNA, 20 nt, synthetic construct
  source 1..20: mol_type = other RNA
ttatgtgcctcgataactct

SEQ ID NO: 620 - RNA, 20 nt, synthetic construct
  source 1..20: mol_type = other RNA
ttatgtgcctcgataactca

SEQ ID NO: 621 - RNA, 20 nt, synthetic construct
  source 1..20: mol_type = other RNA
ttatgtgcctcgataactcc

SEQ ID NO: 622 - RNA, 20 nt, synthetic construct
  source 1..20: mol_type = other RNA
ttatgtgcctcgataactcg

SEQ ID NO: 623 - RNA, 21 nt, synthetic construct
  source 1..21: mol_type = other RNA
ttatgtgcctcgataactcta

SEQ ID NO: 624 - RNA, 21 nt, synthetic construct
  source 1..21: mol_type = other RNA
ttatgtgcctcgataactctg

SEQ ID NO: 625 - RNA, 21 nt, synthetic construct
  source 1..21: mol_type = other RNA
ttatgtgcctcgataactctt

SEQ ID NO: 626 - RNA, 22 nt, synthetic construct
  source 1..22: mol_type = other RNA
ttatgtgcctcgataactctgt

SEQ ID NO: 627 - RNA, 23 nt, synthetic construct
  source 1..23: mol_type = other RNA
ttatgtgcctcgataactctgtc

SEQ ID NO: 628 - RNA, 24 nt, synthetic construct
  source 1..24: mol_type = other RNA
ttatgtgcctcgataactctgtcc

SEQ ID NO: 629 - RNA, 25 nt, synthetic construct
  source 1..25: mol_type = other RNA
ttatgtgcctcgataactctgtcca

SEQ ID NO: 630 - RNA, 26 nt, synthetic construct
  source 1..26: mol_type = other RNA
ttatgtgcctcgataactctgtccat

SEQ ID NO: 631 - RNA, 32 nt, synthetic construct
  source 1..32: mol_type = other RNA
ttatgtgcctcgataactctgtccattaccat

SEQ ID NO: 632 - RNA, 23 nt, synthetic construct
  source 1..23: mol_type = other RNA
ttatgtgcctcgataactctctt

SEQ ID NO: 633 - RNA, 23 nt, synthetic construct
  source 1..23: mol_type = other RNA
ttatgtgcctcgataactctcga

SEQ ID NO: 634 - RNA, 21 nt, synthetic construct
  source 1..21: mol_type = other RNA
ttatgtgcctcgataactctc

SEQ ID NO: 635 - RNA, 21 nt, synthetic construct
  source 1..21: mol_type = other RNA
ttatgtgcctcgataactctc

SEQ ID NO: 636 - RNA, 21 nt, synthetic construct
  source 1..21: mol_type = other RNA
ttatgtgcctcgataactctc

SEQ ID NO: 637 - RNA, 21 nt, synthetic construct
  source 1..21: mol_type = other RNA
ttatgtgcctcgataactctc

SEQ ID NO: 638 - RNA, 21 nt, synthetic construct
  source 1..21: mol_type = other RNA
taatgtgcctcgataactctc

SEQ ID NO: 639 - RNA, 21 nt, synthetic construct
  source 1..21: mol_type = other RNA
ttatgtgcctcgataactctc

SEQ ID NO: 640 - RNA, 21 nt, synthetic construct
  source 1..21: mol_type = other RNA
tagatgaccaagcttggcaac

SEQ ID NO: 641 - RNA, 21 nt, synthetic construct
  source 1..21: mol_type = other RNA
aagatgaccaagcttggcaac

SEQ ID NO: 642 - RNA, 21 nt, synthetic construct
  source 1..21: mol_type = other RNA
gagatgaccaagcttggcaac

SEQ ID NO: 643 - RNA, 21 nt, synthetic construct
  source 1..21: mol_type = other RNA
cagatgaccaagcttggcaac

SEQ ID NO: 644 - RNA, 17 nt, synthetic construct
  source 1..17: mol_type = other RNA
tagatgaccaagcttgg

SEQ ID NO: 645 - RNA, 18 nt, synthetic construct
  source 1..18: mol_type = other RNA
tagatgaccaagcttggc

SEQ ID NO: 646 - RNA, 19 nt, synthetic construct
  source 1..19: mol_type = other RNA
tagatgaccaagcttggct

SEQ ID NO: 647 - RNA, 19 nt, synthetic construct
  source 1..19: mol_type = other RNA
tagatgaccaagcttggca

SEQ ID NO: 648 - RNA, 19 nt, synthetic construct
  source 1..19: mol_type = other RNA
tagatgaccaagcttggcc

SEQ ID NO: 649 - RNA, 19 nt, synthetic construct
  source 1..19: mol_type = other RNA
tagatgaccaagcttggcg

SEQ ID NO: 650 - RNA, 20 nt, synthetic construct
  source 1..20: mol_type = other RNA
tagatgaccaagcttggcat

SEQ ID NO: 651 - RNA, 20 nt, synthetic construct
  source 1..20: mol_type = other RNA
tagatgaccaagcttggcaa

SEQ ID NO: 652 - RNA, 20 nt, synthetic construct
  source 1..20: mol_type = other RNA
tagatgaccaagcttggcac

SEQ ID NO: 653 - RNA, 20 nt, synthetic construct
  source 1..20: mol_type = other RNA
tagatgaccaagcttggcag

SEQ ID NO: 654 - RNA, 21 nt, synthetic construct
  source 1..21: mol_type = other RNA
tagatgaccaagcttggcaaa

SEQ ID NO: 655 - RNA, 21 nt, synthetic construct
  source 1..21: mol_type = other RNA
tagatgaccaagcttggcaag

SEQ ID NO: 656 - RNA, 21 nt, synthetic construct
  source 1..21: mol_type = other RNA
tagatgaccaagcttggcaat

SEQ ID NO: 657 - RNA, 22 nt, synthetic construct
  source 1..22: mol_type = other RNA
tagatgaccaagcttggcaagt

SEQ ID NO: 658 - RNA, 23 nt, synthetic construct
  source 1..23: mol_type = other RNA
tagatgaccaagcttggcaagtt

SEQ ID NO: 659 - RNA, 24 nt, synthetic construct
  source 1..24: mol_type = other RNA
tagatgaccaagcttggcaagttc

SEQ ID NO: 660 - RNA, 25 nt, synthetic construct
  source 1..25: mol_type = other RNA
tagatgaccaagcttggcaagttct

SEQ ID NO: 661 - RNA, 26 nt, synthetic construct
  source 1..26: mol_type = other RNA
tagatgaccaagcttggcaagttctt

SEQ ID NO: 662 - RNA, 32 nt, synthetic construct
  source 1..32: mol_type = other RNA
tagatgaccaagcttggcaagttcttcctgtg

SEQ ID NO: 663 - RNA, 23 nt, synthetic construct
  source 1..23: mol_type = other RNA
tagatgaccaagcttggcaactt

SEQ ID NO: 664 - RNA, 23 nt, synthetic construct
  source 1..23: mol_type = other RNA
tagatgaccaagcttggcaacga

SEQ ID NO: 665 - RNA, 21 nt, synthetic construct
  source 1..21: mol_type = other RNA
tagatgaccaagcttggcaac

SEQ ID NO: 666 - RNA, 21 nt, synthetic construct
  source 1..21: mol_type = other RNA
tagatgaccaagcttggcaac

SEQ ID NO: 667 - RNA, 21 nt, synthetic construct
  source 1..21: mol_type = other RNA
tagatgaccaagcttggcaac

SEQ ID NO: 668 - RNA, 21 nt, synthetic construct
  source 1..21: mol_type = other RNA
tagatgaccaagcttggcaac

SEQ ID NO: 669 - RNA, 21 nt, synthetic construct
  source 1..21: mol_type = other RNA
tggatgaccaagcttggcaac

SEQ ID NO: 670 - RNA, 21 nt, synthetic construct
  source 1..21: mol_type = other RNA
tagatgaccaagcttggcaac

SEQ ID NO: 671 - RNA, 21 nt, synthetic construct
  source 1..21: mol_type = other RNA
tcctcgataactctgtccatg

SEQ ID NO: 672 - RNA, 21 nt, synthetic construct
  source 1..21: mol_type = other RNA
acctcgataactctgtccatg

SEQ ID NO: 673 - RNA, 21 nt, synthetic construct
  source 1..21: mol_type = other RNA
gcctcgataactctgtccatg

SEQ ID NO: 674 - RNA, 21 nt, synthetic construct
  source 1..21: mol_type = other RNA
ccctcgataactctgtccatg

SEQ ID NO: 675 - RNA, 17 nt, synthetic construct
  source 1..17: mol_type = other RNA
tcctcgataactctgtc

SEQ ID NO: 676 - RNA, 18 nt, synthetic construct
  source 1..18: mol_type = other RNA
tcctcgataactctgtcc

SEQ ID NO: 677 - RNA, 19 nt, synthetic construct
  source 1..19: mol_type = other RNA
tcctcgataactctgtcct

SEQ ID NO: 678 - RNA, 19 nt, synthetic construct
  source 1..19: mol_type = other RNA
tcctcgataactctgtcca

SEQ ID NO: 679 - RNA, 19 nt, synthetic construct
  source 1..19: mol_type = other RNA
tcctcgataactctgtccc

SEQ ID NO: 680 - RNA, 19 nt, synthetic construct
  source 1..19: mol_type = other RNA
tcctcgataactctgtccg

SEQ ID NO: 681 - RNA, 20 nt, synthetic construct
  source 1..20: mol_type = other RNA
tcctcgataactctgtccat

SEQ ID NO: 682 - RNA, 20 nt, synthetic construct
  source 1..20: mol_type = other RNA
tcctcgataactctgtccaa

SEQ ID NO: 683 - RNA, 20 nt, synthetic construct
  source 1..20: mol_type = other RNA
tcctcgataactctgtccac

SEQ ID NO: 684 - RNA, 20 nt, synthetic construct
  source 1..20: mol_type = other RNA
tcctcgataactctgtccag

SEQ ID NO: 685 - RNA, 21 nt, synthetic construct
  source 1..21: mol_type = other RNA
tcctcgataactctgtccata

SEQ ID NO: 686 - RNA, 21 nt, synthetic construct
  source 1..21: mol_type = other RNA
tcctcgataactctgtccatc

SEQ ID NO: 687 - RNA, 21 nt, synthetic construct
  source 1..21: mol_type = other RNA
tcctcgataactctgtccatt

SEQ ID NO: 688 - RNA, 22 nt, synthetic construct
  source 1..22: mol_type = other RNA
tcctcgataactctgtccatca

SEQ ID NO: 689 - RNA, 23 nt, synthetic construct
  source 1..23: mol_type = other RNA
tcctcgataactctgtccatcac

SEQ ID NO: 690 - RNA, 24 nt, synthetic construct
  source 1..24: mol_type = other RNA
tcctcgataactctgtccatcacc

SEQ ID NO: 691 - RNA, 25 nt, synthetic construct
  source 1..25: mol_type = other RNA
tcctcgataactctgtccatcacca

SEQ ID NO: 692 - RNA, 26 nt, synthetic construct
  source 1..26: mol_type = other RNA
tcctcgataactctgtccatcaccat

SEQ ID NO: 693 - RNA, 32 nt, synthetic construct
  source 1..32: mol_type = other RNA
tcctcgataactctgtccatcaccatggtagc

SEQ ID NO: 694 - RNA, 23 nt, synthetic construct
  source 1..23: mol_type = other RNA
tcctcgataactctgtccatgtt

SEQ ID NO: 695 - RNA, 23 nt, synthetic construct
  source 1..23: mol_type = other RNA
tcctcgataactctgtccatgga

SEQ ID NO: 696 - RNA, 21 nt, synthetic construct
  source 1..21: mol_type = other RNA
tcctcgataactctgtccatg

SEQ ID NO: 697 - RNA, 21 nt, synthetic construct
  source 1..21: mol_type = other RNA
tcctcgataactctgtccatg

SEQ ID NO: 698 - RNA, 21 nt, synthetic construct
  source 1..21: mol_type = other RNA
tcctcgataactctgtccatg

SEQ ID NO: 699 - RNA, 21 nt, synthetic construct
  source 1..21: mol_type = other RNA
tcctcgataactctgtccatg

SEQ ID NO: 700 - RNA, 21 nt, synthetic construct
  source 1..21: mol_type = other RNA
ttctcgataactctgtccatg

SEQ ID NO: 701 - RNA, 21 nt, synthetic construct
  source 1..21: mol_type = other RNA
tcctcgataactctgtccatg

SEQ ID NO: 702 - RNA, 21 nt, synthetic construct
  source 1..21: mol_type = other RNA
  modified_base 1: mod_base = OTHER; note = 2'-O-methyl modified nucleotide with thiophosphate linkage
  modified_base 2: mod_base = OTHER; note = 2'-O-methyl modified nucleotide with thiophosphate linkage
  modified_base 3: mod_base = OTHER; note = 2'-O-methyl modified nucleotide
  modified_base 4: mod_base = OTHER; note = 2'-O-methyl modified nucleotide
  modified_base 5: mod_base = OTHER; note = 2'-O-methyl modified nucleotide
  modified_base 6: mod_base = OTHER; note = 2'-O-methyl modified nucleotide
  modified_base 7: mod_base = OTHER; note = 2'-O-methyl modified nucleotide
  modified_base 8: mod_base = OTHER; note = 2'-O-methyl modified nucleotide
  modified_base 9: mod_base = OTHER; note = 2'-fluoro modified nucleotide
  modified_base 10: mod_base = OTHER; note = 2'-O-methyl modified nucleotide
  modified_base 11: mod_base = OTHER; note = 2'-fluoro modified nucleotide
  modified_base 12: mod_base = OTHER; note = 2'-O-methyl modified nucleotide
  modified_base 13: mod_base = OTHER; note = 2'-fluoro modified nucleotide
  modified_base 14: mod_base = OTHER; note = 2'-O-methyl modified nucleotide
  modified_base 15: mod_base = OTHER; note = 2'-O-methyl modified nucleotide
  modified_base 16: mod_base = OTHER; note = 2'-O-methyl modified nucleotide
  modified_base 17: mod_base = OTHER; note = 2'-O-methyl modified nucleotide
  modified_base 18: mod_base = OTHER; note = 2'-O-methyl modified nucleotide
  modified_base 19: mod_base = OTHER; note = 2'-O-methyl modified nucleotide
  modified_base 20: mod_base = OTHER; note = 2'-O-methyl modified nucleotide with thiophosphate linkage
  modified_base 21: mod_base = OTHER; note = 2'-O-methyl modified nucleotide
gagagttatcgaggcacataa

SEQ ID NO: 703 - RNA, 21 nt, synthetic construct
  source 1..21: mol_type = other RNA
  modified_base 1: mod_base = OTHER; note = 2'-O-methyl modified nucleotide with thiophosphate linkage
  modified_base 2: mod_base = OTHER; note = 2'-O-methyl modified nucleotide with thiophosphate linkage
  modified_base 3: mod_base = OTHER; note = 2'-O-methyl modified nucleotide
  modified_base 4: mod_base = OTHER; note = 2'-O-methyl modified nucleotide
  modified_base 5: mod_base = OTHER; note = 2'-O-methyl modified nucleotide
  modified_base 6: mod_base = OTHER; note = 2'-O-methyl modified nucleotide
  modified_base 7: mod_base = OTHER; note = 2'-O-methyl modified nucleotide
  modified_base 8: mod_base = OTHER; note = 2'-O-methyl modified nucleotide
  modified_base 9: mod_base = OTHER; note = 2'-fluoro modified nucleotide
  modified_base 10: mod_base = OTHER; note = 2'-O-methyl modified nucleotide
  modified_base 11: mod_base = OTHER; note = 2'-fluoro modified nucleotide
  modified_base 12: mod_base = OTHER; note = 2'-O-methyl modified nucleotide
  modified_base 13: mod_base = OTHER; note = 2'-fluoro modified nucleotide
  modified_base 14: mod_base = OTHER; note = 2'-O-methyl modified nucleotide
  modified_base 15: mod_base = OTHER; note = 2'-O-methyl modified nucleotide
  modified_base 16: mod_base = OTHER; note = 2'-O-methyl modified nucleotide
  modified_base 17: mod_base = OTHER; note = 2'-O-methyl modified nucleotide
  modified_base 18: mod_base = OTHER; note = 2'-O-methyl modified nucleotide
  modified_base 19: mod_base = OTHER; note = 2'-O-methyl modified nucleotide
  modified_base 20: mod_base = OTHER; note = 2'-O-methyl modified nucleotide with thiophosphate linkage
  modified_base 21: mod_base = OTHER; note = 2'-O-methyl modified nucleotide
gagagttatcgaggcacatat

SEQ ID NO: 704 - RNA, 21 nt, synthetic construct
  source 1..21: mol_type = other RNA
  modified_base 1: mod_base = OTHER; note = 2'-O-methyl modified nucleotide with thiophosphate linkage
  modified_base 2: mod_base = OTHER; note = 2'-O-methyl modified nucleotide with thiophosphate linkage
  modified_base 3: mod_base = OTHER; note = 2'-O-methyl modified nucleotide
  modified_base 4: mod_base = OTHER; note = 2'-O-methyl modified nucleotide
  modified_base 5: mod_base = OTHER; note = 2'-O-methyl modified nucleotide
  modified_base 6: mod_base = OTHER; note = 2'-O-methyl modified nucleotide
  modified_base 7: mod_base = OTHER; note = 2'-O-methyl modified nucleotide
  modified_base 8: mod_base = OTHER; note = 2'-O-methyl modified nucleotide
  modified_base 9: mod_base = OTHER; note = 2'-fluoro modified nucleotide
  modified_base 10: mod_base = OTHER; note = 2'-O-methyl modified nucleotide
  modified_base 11: mod_base = OTHER; note = 2'-fluoro modified nucleotide
  modified_base 12: mod_base = OTHER; note = 2'-O-methyl modified nucleotide
  modified_base 13: mod_base = OTHER; note = 2'-fluoro modified nucleotide
  modified_base 14: mod_base = OTHER; note = 2'-O-methyl modified nucleotide
  modified_base 15: mod_base = OTHER; note = 2'-O-methyl modified nucleotide
  modified_base 16: mod_base = OTHER; note = 2'-O-methyl modified nucleotide
  modified_base 17: mod_base = OTHER; note = 2'-O-methyl modified nucleotide
  modified_base 18: mod_base = OTHER; note = 2'-O-methyl modified nucleotide
  modified_base 19: mod_base = OTHER; note = 2'-O-methyl modified nucleotide
  modified_base 20: mod_base = OTHER; note = 2'-O-methyl modified nucleotide with thiophosphate linkage
  modified_base 21: mod_base = OTHER; note = 2'-O-methyl modified nucleotide
gagagttatcgaggcacatac

SEQ ID NO: 705 - RNA, 21 nt, synthetic construct
  source 1..21: mol_type = other RNA
  modified_base 1: mod_base = OTHER; note = 2'-O-methyl modified nucleotide with thiophosphate linkage
  modified_base 2: mod_base = OTHER; note = 2'-O-methyl modified nucleotide with thiophosphate linkage
  modified_base 3: mod_base = OTHER; note = 2'-O-methyl modified nucleotide
  modified_base 4: mod_base = OTHER; note = 2'-O-methyl modified nucleotide
  modified_base 5: mod_base = OTHER; note = 2'-O-methyl modified nucleotide
  modified_base 6: mod_base = OTHER; note = 2'-O-methyl modified nucleotide
  modified_base 7: mod_base = OTHER; note = 2'-O-methyl modified nucleotide
  modified_base 8: mod_base = OTHER; note = 2'-O-methyl modified nucleotide
  modified_base 9: mod_base = OTHER; note = 2'-fluoro modified nucleotide
  modified_base 10: mod_base = OTHER; note = 2'-O-methyl modified nucleotide
  modified_base 11: mod_base = OTHER; note = 2'-fluoro modified nucleotide
  modified_base 12: mod_base = OTHER; note = 2'-O-methyl modified nucleotide
  modified_base 13: mod_base = OTHER; note = 2'-fluoro modified nucleotide
  modified_base 14: mod_base = OTHER; note = 2'-O-methyl modified nucleotide
  modified_base 15: mod_base = OTHER; note = 2'-O-methyl modified nucleotide
  modified_base 16: mod_base = OTHER; note = 2'-O-methyl modified nucleotide
  modified_base 17: mod_base = OTHER; note = 2'-O-methyl modified nucleotide
  modified_base 18: mod_base = OTHER; note = 2'-O-methyl modified nucleotide
  modified_base 19: mod_base = OTHER; note = 2'-O-methyl modified nucleotide
  modified_base 20: mod_base = OTHER; note = 2'-O-methyl modified nucleotide with thiophosphate linkage
  modified_base 21: mod_base = OTHER; note = 2'-O-methyl modified nucleotide
gagagttatcgaggcacatag

SEQ ID NO: 706 - RNA, 17 nt, synthetic construct
  source 1..17: mol_type = other RNA
  modified_base 1: mod_base = OTHER; note = 2'-O-methyl modified nucleotide with thiophosphate linkage
  modified_base 2: mod_base = OTHER; note = 2'-O-methyl modified nucleotide with thiophosphate linkage
  modified_base 3: mod_base = OTHER; note = 2'-O-methyl modified nucleotide
  modified_base 4: mod_base = OTHER; note = 2'-O-methyl modified nucleotide
  modified_base 5: mod_base = OTHER; note = 2'-fluoro modified nucleotide
  modified_base 6: mod_base = OTHER; note = 2'-O-methyl modified nucleotide
  modified_base 7: mod_base = OTHER; note = 2'-fluoro modified nucleotide
  modified_base 8: mod_base = OTHER; note = 2'-O-methyl modified nucleotide
  modified_base 9: mod_base = OTHER; note = 2'-fluoro modified nucleotide
  modified_base 10: mod_base = OTHER; note = 2'-O-methyl modified nucleotide
  modified_base 11: mod_base = OTHER; note = 2'-O-methyl modified nucleotide
  modified_base 12: mod_base = OTHER; note = 2'-O-methyl modified nucleotide
  modified_base 13: mod_base = OTHER; note = 2'-O-methyl modified nucleotide
  modified_base 14: mod_base = OTHER; note = 2'-O-methyl modified nucleotide
  modified_base 15: mod_base = OTHER; note = 2'-O-methyl modified nucleotide
  modified_base 16: mod_base = OTHER; note = 2'-O-methyl modified nucleotide with thiophosphate linkage
  modified_base 17: mod_base = OTHER; note = 2'-O-methyl modified nucleotide
gttatcgaggcacataa

SEQ ID NO: 707 - RNA, 18 nt, synthetic construct
  source 1..18: mol_type = other RNA
  modified_base 1: mod_base = OTHER; note = 2'-O-methyl modified nucleotide with thiophosphate linkage
  modified_base 2: mod_base = OTHER; note = 2'-O-methyl modified nucleotide with thiophosphate linkage
  modified_base 3: mod_base = OTHER; note = 2'-O-methyl modified nucleotide
  modified_base 4: mod_base = OTHER; note = 2'-O-methyl modified nucleotide
  modified_base 5: mod_base = OTHER; note = 2'-O-methyl modified nucleotide
  modified_base 6: mod_base = OTHER; note = 2'-fluoro modified nucleotide
  modified_base 7: mod_base = OTHER; note = 2'-O-methyl modified nucleotide
  modified_base 8: mod_base = OTHER; note = 2'-fluoro modified nucleotide
  modified_base 9: mod_base = OTHER; note = 2'-O-methyl modified nucleotide
  modified_base 10: mod_base = OTHER; note = 2'-fluoro modified nucleotide
  modified_base 11: mod_base = OTHER; note = 2'-O-methyl modified nucleotide
  modified_base 12: mod_base = OTHER; note = 2'-O-methyl modified nucleotide
  modified_base 13: mod_base = OTHER; note = 2'-O-methyl modified nucleotide
  modified_base 14: mod_base = OTHER; note = 2'-O-methyl modified nucleotide
  modified_base 15: mod_base = OTHER; note = 2'-O-methyl modified nucleotide
  modified_base 16: mod_base = OTHER; note = 2'-O-methyl modified nucleotide
  modified_base 17: mod_base = OTHER; note = 2'-O-methyl modified nucleotide with thiophosphate linkage
  modified_base 18: mod_base = OTHER; note = 2'-O-methyl modified nucleotide
agttatcgaggcacataa

SEQ ID NO: 708 - RNA, 19 nt, synthetic construct
  source 1..19: mol_type = other RNA
  modified_base 1: mod_base = OTHER; note = 2'-O-methyl modified nucleotide with thiophosphate linkage
  modified_base 2: mod_base = OTHER; note = 2'-O-methyl modified nucleotide with thiophosphate linkage
  modified_base 3: mod_base = OTHER; note = 2'-O-methyl modified nucleotide
  modified_base 4: mod_base = OTHER; note = 2'-O-methyl modified nucleotide
  modified_base 5: mod_base = OTHER; note = 2'-O-methyl modified nucleotide
  modified_base 6: mod_base = OTHER; note = 2'-O-methyl modified nucleotide
  modified_base 7: mod_base = OTHER; note = 2'-fluoro modified nucleotide
  modified_base 8: mod_base = OTHER; note = 2'-O-methyl modified nucleotide
  modified_base 9: mod_base = OTHER; note = 2'-fluoro modified nucleotide
  modified_base 10: mod_base = OTHER; note = 2'-O-methyl modified nucleotide
  modified_base 11: mod_base = OTHER; note = 2'-fluoro modified nucleotide
  modified_base 12: mod_base = OTHER; note = 2'-O-methyl modified nucleotide
  modified_base 13: mod_base = OTHER; note = 2'-O-methyl modified nucleotide
  modified_base 14: mod_base = OTHER; note = 2'-O-methyl modified nucleotide
  modified_base 15: mod_base = OTHER; note = 2'-O-methyl modified nucleotide
  modified_base 16: mod_base = OTHER; note = 2'-O-methyl modified nucleotide
  modified_base 17: mod_base = OTHER; note = 2'-O-methyl modified nucleotide
  modified_base 18: mod_base = OTHER; note = 2'-O-methyl modified nucleotide with thiophosphate linkage
  modified_base 19: mod_base = OTHER; note = 2'-O-methyl modified nucleotide
aagttatcgaggcacataa

SEQ ID NO: 709 - RNA, 19 nt, synthetic construct
  source 1..19: mol_type = other RNA
  modified_base 1: mod_base = OTHER; note = 2'-O-methyl modified nucleotide with thiophosphate linkage
  modified_base 2: mod_base = OTHER; note = 2'-O-methyl modified nucleotide with thiophosphate linkage
  modified_base 3: mod_base = OTHER; note = 2'-O-methyl modified nucleotide
  modified_base 4: mod_base = OTHER; note = 2'-O-methyl modified nucleotide
  modified_base 5: mod_base = OTHER; note = 2'-O-methyl modified nucleotide
  modified_base 6: mod_base = OTHER; note = 2'-O-methyl modified nucleotide
  modified_base 7: mod_base = OTHER; note = 2'-fluoro modified nucleotide
  modified_base 8: mod_base = OTHER; note = 2'-O-methyl modified nucleotide
  modified_base 9: mod_base = OTHER; note = 2'-fluoro modified nucleotide
  modified_base 10: mod_base = OTHER; note = 2'-O-methyl modified nucleotide
  modified_base 11: mod_base = OTHER; note = 2'-fluoro modified nucleotide
  modified_base 12: mod_base = OTHER; note = 2'-O-methyl modified nucleotide
  modified_base 13: mod_base = OTHER; note = 2'-O-methyl modified nucleotide
  modified_base 14: mod_base = OTHER; note = 2'-O-methyl modified nucleotide
  modified_base 15: mod_base = OTHER; note = 2'-O-methyl modified nucleotide
  modified_base 16: mod_base = OTHER; note = 2'-O-methyl modified nucleotide
  modified_base 17: mod_base = OTHER; note = 2'-O-methyl modified nucleotide
  modified_base 18: mod_base = OTHER; note = 2'-O-methyl modified nucleotide with thiophosphate linkage
  modified_base 19: mod_base = OTHER; note = 2'-O-methyl modified nucleotide
tagttatcgaggcacataa

SEQ ID NO: 710 - RNA, 19 nt, synthetic construct
  source 1..19: mol_type = other RNA
  modified_base 1: mod_base = OTHER; note = 2'-O-methyl modified nucleotide with thiophosphate linkage
  modified_base 2: mod_base = OTHER; note = 2'-O-methyl modified nucleotide with thiophosphate linkage
  modified_base 3: mod_base = OTHER; note = 2'-O-methyl modified nucleotide
  modified_base 4: mod_base = OTHER; note = 2'-O-methyl modified nucleotide
  modified_base 5: mod_base = OTHER; note = 2'-O-methyl modified nucleotide
  modified_base 6: mod_base = OTHER; note = 2'-O-methyl modified nucleotide
  modified_base 7: mod_base = OTHER; note = 2'-fluoro modified nucleotide
  modified_base 8: mod_base = OTHER; note = 2'-O-methyl modified nucleotide
  modified_base 9: mod_base = OTHER; note = 2'-fluoro modified nucleotide
  modified_base 10: mod_base = OTHER; note = 2'-O-methyl modified nucleotide
  modified_base 11: mod_base = OTHER; note = 2'-fluoro modified nucleotide
  modified_base 12: mod_base = OTHER; note = 2'-O-methyl modified nucleotide
  modified_base 13: mod_base = OTHER; note = 2'-O-methyl modified nucleotide
  modified_base 14: mod_base = OTHER; note = 2'-O-methyl modified nucleotide
  modified_base 15: mod_base = OTHER; note = 2'-O-methyl modified nucleotide
  modified_base 16: mod_base = OTHER; note = 2'-O-methyl modified nucleotide
  modified_base 17: mod_base = OTHER; note = 2'-O-methyl modified nucleotide
  modified_base 18: mod_base = OTHER; note = 2'-O-methyl modified nucleotide with thiophosphate linkage
  modified_base 19: mod_base = OTHER; note = 2'-O-methyl modified nucleotide
gagttatcgaggcacataa

SEQ ID NO: 711 - RNA, 19 nt, synthetic construct
  source 1..19: mol_type = other RNA
  modified_base 1: mod_base = OTHER; note = 2'-O-methyl modified nucleotide with thiophosphate linkage
  modified_base 2: mod_base = OTHER; note = 2'-O-methyl modified nucleotide with thiophosphate linkage
  modified_base 3: mod_base = OTHER; note = 2'-O-methyl modified nucleotide
  modified_base 4: mod_base = OTHER; note = 2'-O-methyl modified nucleotide
  modified_base 5: mod_base = OTHER; note = 2'-O-methyl modified nucleotide
  modified_base 6: mod_base = OTHER; note = 2'-O-methyl modified nucleotide
  modified_base 7: mod_base = OTHER; note = 2'-fluoro modified nucleotide
  modified_base 8: mod_base = OTHER; note = 2'-O-methyl modified nucleotide
  modified_base 9: mod_base = OTHER; note = 2'-fluoro modified nucleotide
  modified_base 10: mod_base = OTHER; note = 2'-O-methyl modified nucleotide
  modified_base 11: mod_base = OTHER; note = 2'-fluoro modified nucleotide
  modified_base 12: mod_base = OTHER; note = 2'-O-methyl modified nucleotide
  modified_base 13: mod_base = OTHER; note = 2'-O-methyl modified nucleotide
  modified_base 14: mod_base = OTHER; note = 2'-O-methyl modified nucleotide
  modified_base 15: mod_base = OTHER; note = 2'-O-methyl modified nucleotide
  modified_base 16: mod_base = OTHER; note = 2'-O-methyl modified nucleotide
  modified_base 17: mod_base = OTHER; note = 2'-O-methyl modified nucleotide
  modified_base 18: mod_base = OTHER; note = 2'-O-methyl modified nucleotide with thiophosphate linkage
  modified_base 19: mod_base = OTHER; note = 2'-O-methyl modified nucleotide
cagttatcgaggcacataa

SEQ ID NO: 712 - RNA, 20 nt, synthetic construct
  source 1..20: mol_type = other RNA
  modified_base 1: mod_base = OTHER; note = 2'-O-methyl modified nucleotide with thiophosphate linkage
  modified_base 2: mod_base = OTHER; note = 2'-O-methyl modified nucleotide with thiophosphate linkage
  modified_base 3: mod_base = OTHER; note = 2'-O-methyl modified nucleotide
  modified_base 4: mod_base = OTHER; note = 2'-O-methyl modified nucleotide
  modified_base 5: mod_base = OTHER; note = 2'-O-methyl modified nucleotide
  modified_base 6: mod_base = OTHER; note = 2'-O-methyl modified nucleotide
  modified_base 7: mod_base = OTHER; note = 2'-O-methyl modified nucleotide
  modified_base 8: mod_base = OTHER; note = 2'-fluoro modified nucleotide
  modified_base 9: mod_base = OTHER; note = 2'-O-methyl modified nucleotide
  modified_base 10: mod_base = OTHER; note = 2'-fluoro modified nucleotide
  modified_base 11: mod_base = OTHER; note = 2'-O-methyl modified nucleotide
  modified_base 12: mod_base = OTHER; note = 2'-fluoro modified nucleotide
  modified_base 13: mod_base = OTHER; note = 2'-O-methyl modified nucleotide
  modified_base 14: mod_base = OTHER; note = 2'-O-methyl modified nucleotide
  modified_base 15: mod_base = OTHER; note = 2'-O-methyl modified nucleotide
  modified_base 16: mod_base = OTHER; note = 2'-O-methyl modified nucleotide
  modified_base 17: mod_base = OTHER; note = 2'-O-methyl modified nucleotide
  modified_base 18: mod_base = OTHER; note = 2'-O-methyl modified nucleotide
  modified_base 19: mod_base = OTHER; note = 2'-O-methyl modified nucleotide with thiophosphate linkage
  modified_base 20: mod_base = OTHER; note = 2'-O-methyl modified nucleotide
agagttatcgaggcacataa

SEQ ID NO: 713 - RNA, 20 nt, synthetic construct
  source 1..20: mol_type = other RNA
  modified_base 1: mod_base = OTHER; note = 2'-O-methyl modified nucleotide with thiophosphate linkage
  modified_base 2: mod_base = OTHER; note = 2'-O-methyl modified nucleotide with thiophosphate linkage
  modified_base 3: mod_base = OTHER; note = 2'-O-methyl modified nucleotide
  modified_base 4: mod_base = OTHER; note = 2'-O-methyl modified nucleotide
  modified_base 5: mod_base = OTHER; note = 2'-O-methyl modified nucleotide
  modified_base 6: mod_base = OTHER; note = 2'-O-methyl modified nucleotide
  modified_base 7: mod_base = OTHER; note = 2'-O-methyl modified nucleotide
  modified_base 8: mod_base = OTHER; note = 2'-fluoro modified nucleotide
  modified_base 9: mod_base = OTHER; note = 2'-O-methyl modified nucleotide
  modified_base 10: mod_base = OTHER; note = 2'-fluoro modified nucleotide
  modified_base 11: mod_base = OTHER; note = 2'-O-methyl modified nucleotide
  modified_base 12: mod_base = OTHER; note = 2'-fluoro modified nucleotide
  modified_base 13: mod_base = OTHER; note = 2'-O-methyl modified nucleotide
  modified_base 14: mod_base = OTHER; note = 2'-O-methyl modified nucleotide
  modified_base 15: mod_base = OTHER; note = 2'-O-methyl modified nucleotide
  modified_base 16: mod_base = OTHER; note = 2'-O-methyl modified nucleotide
  modified_base 17: mod_base = OTHER; note = 2'-O-methyl modified nucleotide
  modified_base 18: mod_base = OTHER; note = 2'-O-methyl modified nucleotide
  modified_base 19: mod_base = OTHER; note = 2'-O-methyl modified nucleotide with thiophosphate linkage
  modified_base 20: mod_base = OTHER; note = 2'-O-methyl modified nucleotide
tgagttatcgaggcacataa

SEQ ID NO: 714 - RNA, 20 nt, synthetic construct
  source 1..20: mol_type = other RNA
  modified_base 1: mod_base = OTHER; note = 2'-O-methyl modified nucleotide with thiophosphate linkage
  modified_base 2: mod_base = OTHER; note = 2'-O-methyl modified nucleotide with thiophosphate linkage
  modified_base 3: mod_base = OTHER; note = 2'-O-methyl modified nucleotide
  modified_base 4: mod_base = OTHER; note = 2'-O-methyl modified nucleotide
  modified_base 5: mod_base = OTHER; note = 2'-O-methyl modified nucleotide
  modified_base 6: mod_base = OTHER; note = 2'-O-methyl modified nucleotide
  modified_base 7: mod_base = OTHER; note = 2'-O-methyl modified nucleotide
  modified_base 8: mod_base = OTHER; note = 2'-fluoro modified nucleotide
  modified_base 9: mod_base = OTHER; note = 2'-O-methyl modified nucleotide
  modified_base 10: mod_base = OTHER; note = 2'-fluoro modified nucleotide
  modified_base 11: mod_base = OTHER; note = 2'-O-methyl modified nucleotide
  modified_base 12: mod_base = OTHER; note = 2'-fluoro modified nucleotide
  modified_base 13: mod_base = OTHER; note = 2'-O-methyl modified nucleotide
  modified_base 14: mod_base = OTHER; note = 2'-O-methyl modified nucleotide
  modified_base 15: mod_base = OTHER; note = 2'-O-methyl modified nucleotide
  modified_base 16: mod_base = OTHER; note = 2'-O-methyl modified nucleotide
  modified_base 17: mod_base = OTHER; note = 2'-O-methyl modified nucleotide
  modified_base 18: mod_base = OTHER; note = 2'-O-methyl modified nucleotide
  modified_base 19: mod_base = OTHER; note = 2'-O-methyl modified nucleotide with thiophosphate linkage
  modified_base 20: mod_base = OTHER; note = 2'-O-methyl modified nucleotide
ggagttatcgaggcacataa

SEQ ID NO: 715 - RNA, 20 nt, synthetic construct
  source 1..20: mol_type = other RNA
  modified_base 1: mod_base = OTHER; note = 2'-O-methyl modified nucleotide with thiophosphate linkage
  modified_base 2: mod_base = OTHER; note = 2'-O-methyl modified nucleotide with thiophosphate linkage
  modified_base 3: mod_base = OTHER; note = 2'-O-methyl modified nucleotide
  modified_base 4: mod_base = OTHER; note = 2'-O-methyl modified nucleotide
  modified_base 5: mod_base = OTHER; note = 2'-O-methyl modified nucleotide
  modified_base 6: mod_base = OTHER; note = 2'-O-methyl modified nucleotide
  modified_base 7: mod_base = OTHER; note = 2'-O-methyl modified nucleotide
  modified_base 8: mod_base = OTHER; note = 2'-fluoro modified nucleotide
  modified_base 9: mod_base = OTHER; note = 2'-O-methyl modified nucleotide
  modified_base 10: mod_base = OTHER; note = 2'-fluoro modified nucleotide
  modified_base 11: mod_base = OTHER; note = 2'-O-methyl modified nucleotide
  modified_base 12: mod_base = OTHER; note = 2'-fluoro modified nucleotide
  modified_base 13: mod_base = OTHER; note = 2'-O-methyl modified nucleotide
  modified_base 14: mod_base = OTHER; note = 2'-O-methyl modified nucleotide
  modified_base 15: mod_base = OTHER; note = 2'-O-methyl modified nucleotide
  modified_base 16: mod_base = OTHER; note = 2'-O-methyl modified nucleotide
  modified_base 17: mod_base = OTHER; note = 2'-O-methyl modified nucleotide
  modified_base 18: mod_base = OTHER; note = 2'-O-methyl modified nucleotide
  modified_base 19: mod_base = OTHER; note = 2'-O-methyl modified nucleotide with thiophosphate linkage
  modified_base 20: mod_base = OTHER; note = 2'-O-methyl modified nucleotide
cgagttatcgaggcacataa

SEQ ID NO: 716 - RNA, 21 nt, synthetic construct
  source 1..21: mol_type = other RNA
  modified_base 1: mod_base = OTHER; note = 2'-O-methyl modified nucleotide with thiophosphate linkage
  modified_base 2: mod_base = OTHER; note = 2'-O-methyl modified nucleotide with thiophosphate linkage
  modified_base 3: mod_base = OTHER; note = 2'-O-methyl modified nucleotide
  modified_base 4: mod_base = OTHER; note = 2'-O-methyl modified nucleotide
  modified_base 5: mod_base = OTHER; note = 2'-O-methyl modified nucleotide
  modified_base 6: mod_base = OTHER; note = 2'-O-methyl modified nucleotide
  modified_base 7: mod_base = OTHER; note = 2'-O-methyl modified nucleotide
  modified_base 8: mod_base = OTHER; note = 2'-O-methyl modified nucleotide
  modified_base 9: mod_base = OTHER; note = 2'-fluoro modified nucleotide
  modified_base 10: mod_base = OTHER; note = 2'-O-methyl modified nucleotide
  modified_base 11: mod_base = OTHER; note = 2'-fluoro modified nucleotide
  modified_base 12: mod_base = OTHER; note = 2'-O-methyl modified nucleotide
  modified_base 13: mod_base = OTHER; note = 2'-fluoro modified nucleotide
  modified_base 14: mod_base = OTHER; note = 2'-O-methyl modified nucleotide
  modified_base 15: mod_base = OTHER; note = 2'-O-methyl modified nucleotide
  modified_base 16: mod_base = OTHER; note = 2'-O-methyl modified nucleotide
  modified_base 17: mod_base = OTHER; note = 2'-O-methyl modified nucleotide
  modified_base 18: mod_base = OTHER; note = 2'-O-methyl modified nucleotide
  modified_base 19: mod_base = OTHER; note = 2'-O-methyl modified nucleotide
  modified_base 20: mod_base = OTHER; note = 2'-O-methyl modified nucleotide with thiophosphate linkage
  modified_base 21: mod_base = OTHER; note = 2'-O-methyl modified nucleotide
tagagttatcgaggcacataa

SEQ ID NO: 717 - RNA, 21 nt, synthetic construct
  source 1..21: mol_type = other RNA
  modified_base 1: mod_base = OTHER; note = 2'-O-methyl modified nucleotide with thiophosphate linkage
  modified_base 2: mod_base = OTHER; note = 2'-O-methyl modified nucleotide with thiophosphate linkage
  modified_base 3: mod_base = OTHER; note = 2'-O-methyl modified nucleotide
  modified_base 4: mod_base = OTHER; note = 2'-O-methyl modified nucleotide
  modified_base 5: mod_base = OTHER; note = 2'-O-methyl modified nucleotide
  modified_base 6: mod_base = OTHER; note = 2'-O-methyl modified nucleotide
  modified_base 7: mod_base = OTHER; note = 2'-O-methyl modified nucleotide
  modified_base 8: mod_base = OTHER; note = 2'-O-methyl modified nucleotide
  modified_base 9: mod_base = OTHER; note = 2'-fluoro modified nucleotide
  modified_base 10: mod_base = OTHER; note = 2'-O-methyl modified nucleotide
  modified_base 11: mod_base = OTHER; note = 2'-fluoro modified nucleotide
  modified_base 12: mod_base = OTHER; note = 2'-O-methyl modified nucleotide
  modified_base 13: mod_base = OTHER; note = 2'-fluoro modified nucleotide
  modified_base 14: mod_base = OTHER; note = 2'-O-methyl modified nucleotide
  modified_base 15: mod_base = OTHER; note = 2'-O-methyl modified nucleotide
  modified_base 16: mod_base = OTHER; note = 2'-O-methyl modified nucleotide
  modified_base 17: mod_base = OTHER; note = 2'-O-methyl modified nucleotide
  modified_base 18: mod_base = OTHER; note = 2'-O-methyl modified nucleotide
  modified_base 19: mod_base = OTHER; note = 2'-O-methyl modified nucleotide
  modified_base 20: mod_base = OTHER; note = 2'-O-methyl modified nucleotide with thiophosphate linkage
  modified_base 21: mod_base = OTHER; note = 2'-O-methyl modified nucleotide
cagagttatcgaggcacataa

SEQ ID NO: 718 - RNA, 21 nt, synthetic construct
  source 1..21: mol_type = other RNA
  modified_base 1: mod_base = OTHER; note = 2'-O-methyl modified nucleotide with thiophosphate linkage
  modified_base 2: mod_base = OTHER; note = 2'-O-methyl modified nucleotide with thiophosphate linkage
  modified_base 3: mod_base = OTHER; note = 2'-O-methyl modified nucleotide
  modified_base 4: mod_base = OTHER; note = 2'-O-methyl modified nucleotide
  modified_base 5: mod_base = OTHER; note = 2'-O-methyl modified nucleotide
  modified_base 6: mod_base = OTHER; note = 2'-O-methyl modified nucleotide
  modified_base 7: mod_base = OTHER; note = 2'-O-methyl modified nucleotide
  modified_base 8: mod_base = OTHER; note = 2'-O-methyl modified nucleotide
  modified_base 9: mod_base = OTHER; note = 2'-fluoro modified nucleotide
  modified_base 10: mod_base = OTHER; note = 2'-O-methyl modified nucleotide
  modified_base 11: mod_base = OTHER; note = 2'-fluoro modified nucleotide
  modified_base 12: mod_base = OTHER; note = 2'-O-methyl modified nucleotide
  modified_base 13: mod_base = OTHER; note = 2'-fluoro modified nucleotide
  modified_base 14: mod_base = OTHER; note = 2'-O-methyl modified nucleotide
  modified_base 15: mod_base = OTHER; note = 2'-O-methyl modified nucleotide
  modified_base 16: mod_base = OTHER; note = 2'-O-methyl modified nucleotide
  modified_base 17: mod_base = OTHER; note = 2'-O-methyl modified nucleotide
  modified_base 18: mod_base = OTHER; note = 2'-O-methyl modified nucleotide
  modified_base 19: mod_base = OTHER; note = 2'-O-methyl modified nucleotide
  modified_base 20: mod_base = OTHER; note = 2'-O-methyl modified nucleotide with thiophosphate linkage
  modified_base 21: mod_base = OTHER; note = 2'-O-methyl modified nucleotide
aagagttatcgaggcacataa

SEQ ID NO: 719 - RNA, 22 nt, synthetic construct
  source 1..22: mol_type = other RNA
  modified_base 1: mod_base = OTHER; note = 2'-O-methyl modified nucleotide with thiophosphate linkage
  modified_base 2: mod_base = OTHER; note = 2'-O-methyl modified nucleotide with thiophosphate linkage
  modified_base 3: mod_base = OTHER; note = 2'-O-methyl modified nucleotide
  modified_base 4: mod_base = OTHER; note = 2'-O-methyl modified nucleotide
  modified_base 5: mod_base = OTHER; note = 2'-O-methyl modified nucleotide
  modified_base 6: mod_base = OTHER; note = 2'-O-methyl modified nucleotide
  modified_base 7: mod_base = OTHER; note = 2'-O-methyl modified nucleotide
  modified_base 8: mod_base = OTHER; note = 2'-O-methyl modified nucleotide
  modified_base 9: mod_base = OTHER; note = 2'-O-methyl modified nucleotide
  modified_base 10: mod_base = OTHER; note = 2'-fluoro modified nucleotide
  modified_base 11: mod_base = OTHER; note = 2'-O-methyl modified nucleotide
  modified_base 12: mod_base = OTHER; note = 2'-fluoro modified nucleotide
  modified_base 13: mod_base = OTHER; note = 2'-O-methyl modified nucleotide
  modified_base 14: mod_base = OTHER; note = 2'-fluoro modified nucleotide
  modified_base 15: mod_base = OTHER; note = 2'-O-methyl modified nucleotide
  modified_base 16: mod_base = OTHER; note = 2'-O-methyl modified nucleotide
  modified_base 17: mod_base = OTHER; note = 2'-O-methyl modified nucleotide
  modified_base 18: mod_base = OTHER; note = 2'-O-methyl modified nucleotide
  modified_base 19: mod_base = OTHER; note = 2'-O-methyl modified nucleotide
  modified_base 20: mod_base = OTHER; note = 2'-O-methyl modified nucleotide
  modified_base 21: mod_base = OTHER; note = 2'-O-methyl modified nucleotide with thiophosphate linkage
  modified_base 22: mod_base = OTHER; note = 2'-O-methyl modified nucleotide
acagagttatcgaggcacataa

SEQ ID NO: 720 - RNA, 23 nt, synthetic construct
  source 1..23: mol_type = other RNA
  modified_base 1: mod_base = OTHER; note = 2'-O-methyl modified nucleotide with thiophosphate linkage
  modified_base 2: mod_base = OTHER; note = 2'-O-methyl modified nucleotide with thiophosphate linkage
  modified_base 3: mod_base = OTHER; note = 2'-O-methyl modified nucleotide
  modified_base 4: mod_base = OTHER; note = 2'-O-methyl modified nucleotide
  modified_base 5: mod_base = OTHER; note = 2'-O-methyl modified nucleotide
  modified_base 6: mod_base = OTHER; note = 2'-O-methyl modified nucleotide
  modified_base 7: mod_base = OTHER; note = 2'-O-methyl modified nucleotide
  modified_base 8: mod_base = OTHER; note = 2'-O-methyl modified nucleotide
  modified_base 9: mod_base = OTHER; note = 2'-O-methyl modified nucleotide
  modified_base 10: mod_base = OTHER; note = 2'-O-methyl modified nucleotide
  modified_base 11: mod_base = OTHER; note = 2'-fluoro modified nucleotide
  modified_base 12: mod_base = OTHER; note = 2'-O-methyl modified nucleotide
  modified_base 13: mod_base = OTHER; note = 2'-fluoro modified nucleotide
  modified_base 14: mod_base = OTHER; note = 2'-O-methyl modified nucleotide
  modified_base 15: mod_base = OTHER; note = 2'-fluoro modified nucleotide
  modified_base 16: mod_base = OTHER; note = 2'-O-methyl modified nucleotide
  modified_base 17: mod_base = OTHER; note = 2'-O-methyl modified nucleotide
  modified_base 18: mod_base = OTHER; note = 2'-O-methyl modified nucleotide
  modified_base 19: mod_base = OTHER; note = 2'-O-methyl modified nucleotide
  modified_base 20: mod_base = OTHER; note = 2'-O-methyl modified nucleotide
  modified_base 21: mod_base = OTHER; note = 2'-O-methyl modified nucleotide
  modified_base 22: mod_base = OTHER; note = 2'-O-methyl modified nucleotide with thiophosphate linkage
  modified_base 23: mod_base = OTHER; note = 2'-O-methyl modified nucleotide
gacagagttatcgaggcacataa

SEQ ID NO: 721 - RNA, 24 nt, synthetic construct
  source 1..24: mol_type = other RNA
  modified_base 1: mod_base = OTHER; note = 2'-O-methyl modified nucleotide with thiophosphate linkage
  modified_base 2: mod_base = OTHER; note = 2'-O-methyl modified nucleotide with thiophosphate linkage
  modified_base 3: mod_base = OTHER; note = 2'-O-methyl modified nucleotide
  modified_base 4: mod_base = OTHER; note = 2'-O-methyl modified nucleotide
  modified_base 5: mod_base = OTHER; note = 2'-O-methyl modified nucleotide
  modified_base 6: mod_base = OTHER; note = 2'-O-methyl modified nucleotide
  modified_base 7: mod_base = OTHER; note = 2'-O-methyl modified nucleotide
  modified_base 8: mod_base = OTHER; note = 2'-O-methyl modified nucleotide
  modified_base 9: mod_base = OTHER; note = 2'-O-methyl modified nucleotide
  modified_base 10: mod_base = OTHER; note = 2'-O-methyl modified nucleotide
  modified_base 11: mod_base = OTHER; note = 2'-O-methyl modified nucleotide
  modified_base 12: mod_base = OTHER; note = 2'-fluoro modified nucleotide
  modified_base 13: mod_base = OTHER; note = 2'-O-methyl modified nucleotide
  modified_base 14: mod_base = OTHER; note = 2'-fluoro modified nucleotide
  modified_base 15: mod_base = OTHER; note = 2'-O-methyl modified nucleotide
  modified_base 16: mod_base = OTHER; note = 2'-fluoro modified nucleotide
  modified_base 17: mod_base = OTHER; note = 2'-O-methyl modified nucleotide
  modified_base 18: mod_base = OTHER; note = 2'-O-methyl modified nucleotide
  modified_base 19: mod_base = OTHER; note = 2'-O-methyl modified nucleotide
  modified_base 20: mod_base = OTHER; note = 2'-O-methyl modified nucleotide
  modified_base 21: mod_base = OTHER; note = 2'-O-methyl modified nucleotide
  modified_base 22: mod_base = OTHER; note = 2'-O-methyl modified nucleotide
  modified_base 23: mod_base = OTHER; note = 2'-O-methyl modified nucleotide with thiophosphate linkage
  modified_base 24: mod_base = OTHER; note = 2'-O-methyl modified nucleotide
ggacagagttatcgaggcacataa

SEQ ID NO: 722 - RNA, 25 nt, synthetic construct
  source 1..25: mol_type = other RNA
  modified_base 1: mod_base = OTHER; note = 2'-O-methyl modified nucleotide with thiophosphate linkage
  modified_base 2: mod_base = OTHER; note = 2'-O-methyl modified nucleotide with thiophosphate linkage
  modified_base 3: mod_base = OTHER; note = 2'-O-methyl modified nucleotide
  modified_base 4: mod_base = OTHER; note = 2'-O-methyl modified nucleotide
  modified_base 5: mod_base = OTHER; note = 2'-O-methyl modified nucleotide
  modified_base 6: mod_base = OTHER; note = 2'-O-methyl modified nucleotide
  modified_base 7: mod_base = OTHER; note = 2'-O-methyl modified nucleotide
  modified_base 8: mod_base = OTHER; note = 2'-O-methyl modified nucleotide
  modified_base 9: mod_base = OTHER; note = 2'-O-methyl modified nucleotide
  modified_base 10: mod_base = OTHER; note = 2'-O-methyl modified nucleotide
  modified_base 11: mod_base = OTHER; note = 2'-O-methyl modified nucleotide
  modified_base 12: mod_base = OTHER; note = 2'-O-methyl modified nucleotide
  modified_base 13: mod_base = OTHER; note = 2'-fluoro modified nucleotide
  modified_base 14: mod_base = OTHER; note = 2'-O-methyl modified nucleotide
  modified_base 15: mod_base = OTHER; note = 2'-fluoro modified nucleotide
  modified_base 16: mod_base = OTHER; note = 2'-O-methyl modified nucleotide
  modified_base 17: mod_base = OTHER; note = 2'-fluoro modified nucleotide
  modified_base 18: mod_base = OTHER; note = 2'-O-methyl modified nucleotide
  modified_base 19: mod_base = OTHER; note = 2'-O-methyl modified nucleotide
  modified_base 20: mod_base = OTHER; note = 2'-O-methyl modified nucleotide
  modified_base 21: mod_base = OTHER; note = 2'-O-methyl modified nucleotide
  modified_base 22: mod_base = OTHER; note = 2'-O-methyl modified nucleotide
  modified_base 23: mod_base = OTHER; note = 2'-O-methyl modified nucleotide
  modified_base 24: mod_base = OTHER; note = 2'-O-methyl modified nucleotide with thiophosphate linkage
  modified_base 25: mod_base = OTHER; note = 2'-O-methyl modified nucleotide
tggacagagttatcgaggcacataa

SEQ ID NO: 723 - RNA, 26 nt, synthetic construct
  source 1..26: mol_type = other RNA
  modified_base 1: mod_base = OTHER; note = 2'-O-methyl modified nucleotide with thiophosphate linkage
  modified_base 2: mod_base = OTHER; note = 2'-O-methyl modified nucleotide with thiophosphate linkage
  modified_base 3: mod_base = OTHER; note = 2'-O-methyl modified nucleotide
  modified_base 4: mod_base = OTHER; note = 2'-O-methyl modified nucleotide
  modified_base 5: mod_base = OTHER; note = 2'-O-methyl modified nucleotide
  modified_base 6: mod_base = OTHER; note = 2'-O-methyl modified nucleotide
  modified_base 7: mod_base = OTHER; note = 2'-O-methyl modified nucleotide
  modified_base 8: mod_base = OTHER; note = 2'-O-methyl modified nucleotide
  modified_base 9: mod_base = OTHER; note = 2'-O-methyl modified nucleotide
  modified_base 10: mod_base = OTHER; note = 2'-O-methyl modified nucleotide
  modified_base 11: mod_base = OTHER; note = 2'-O-methyl modified nucleotide
  modified_base 12: mod_base = OTHER; note = 2'-O-methyl modified nucleotide
  modified_base 13: mod_base = OTHER; note = 2'-O-methyl modified nucleotide
  modified_base 14: mod_base = OTHER; note = 2'-fluoro modified nucleotide
  modified_base 15: mod_base = OTHER; note = 2'-O-methyl modified nucleotide
  modified_base 16: mod_base = OTHER; note = 2'-fluoro modified nucleotide
  modified_base 17: mod_base = OTHER; note = 2'-O-methyl modified nucleotide
  modified_base 18: mod_base = OTHER; note = 2'-fluoro modified nucleotide
  modified_base 19: mod_base = OTHER; note = 2'-O-methyl modified nucleotide
  modified_base 20: mod_base = OTHER; note = 2'-O-methyl modified nucleotide
  modified_base 21: mod_base = OTHER; note = 2'-O-methyl modified nucleotide
  modified_base 22: mod_base = OTHER; note = 2'-O-methyl modified nucleotide
  modified_base 23: mod_base = OTHER; note = 2'-O-methyl modified nucleotide
  modified_base 24: mod_base = OTHER; note = 2'-O-methyl modified nucleotide
  modified_base 25: mod_base = OTHER; note = 2'-O-methyl modified nucleotide with thiophosphate linkage
  modified_base 26: mod_base = OTHER; note = 2'-O-methyl modified nucleotide
atggacagagttatcgaggcacataa

SEQ ID NO: 724 - RNA, 32 nt, synthetic construct; identical to SEQ ID NO: 537
  source 1..32: mol_type = other RNA
  modified_base 1: mod_base = OTHER; note = 2'-O-methyl modified nucleotide with thiophosphate linkage
  modified_base 2: mod_base = OTHER; note = 2'-O-methyl modified nucleotide with thiophosphate linkage
  modified_base 3: mod_base = OTHER; note = 2'-O-methyl modified nucleotide
  modified_base 4: mod_base = OTHER; note = 2'-O-methyl modified nucleotide
  modified_base 5: mod_base = OTHER; note = 2'-O-methyl modified nucleotide
  modified_base 6: mod_base = OTHER; note = 2'-O-methyl modified nucleotide
  modified_base 7: mod_base = OTHER; note = 2'-O-methyl modified nucleotide
  modified_base 8: mod_base = OTHER; note = 2'-O-methyl modified nucleotide
  modified_base 9: mod_base = OTHER; note = 2'-O-methyl modified nucleotide
  modified_base 10: mod_base = OTHER; note = 2'-O-methyl modified nucleotide
  modified_base 11: mod_base = OTHER; note = 2'-O-methyl modified nucleotide
  modified_base 12: mod_base = OTHER; note = 2'-O-methyl modified nucleotide
  modified_base 13: mod_base = OTHER; note = 2'-O-methyl modified nucleotide
  modified_base 14: mod_base = OTHER; note = 2'-O-methyl modified nucleotide
  modified_base 15: mod_base = OTHER; note = 2'-O-methyl modified nucleotide
  modified_base 16: mod_base = OTHER; note = 2'-O-methyl modified nucleotide
  modified_base 17: mod_base = OTHER; note = 2'-O-methyl modified nucleotide
  modified_base 18: mod_base = OTHER; note = 2'-O-methyl modified nucleotide
  modified_base 19: mod_base = OTHER; note = 2'-O-methyl modified nucleotide
  modified_base 20: mod_base = OTHER; note = 2'-fluoro modified nucleotide
  modified_base 21: mod_base = OTHER; note = 2'-O-methyl modified nucleotide
  modified_base 22: mod_base = OTHER; note = 2'-fluoro modified nucleotide
  modified_base 23: mod_base = OTHER; note = 2'-O-methyl modified nucleotide
  modified_base 24: mod_base = OTHER; note = 2'-fluoro modified nucleotide
  modified_base 25: mod_base = OTHER; note = 2'-O-methyl modified nucleotide
  modified_base 26: mod_base = OTHER; note = 2'-O-methyl modified nucleotide
  modified_base 27: mod_base = OTHER; note = 2'-O-methyl modified nucleotide
  modified_base 28: mod_base = OTHER; note = 2'-O-methyl modified nucleotide
  modified_base 29: mod_base = OTHER; note = 2'-O-methyl modified nucleotide
  modified_base 30: mod_base = OTHER; note = 2'-O-methyl modified nucleotide
  modified_base 31: mod_base = OTHER; note = 2'-O-methyl modified nucleotide with thiophosphate linkage
  modified_base 32: mod_base = OTHER; note = 2'-O-methyl modified nucleotide

SEQ ID NO: 725 - RNA, 21 nt, synthetic construct
  source 1..21: mol_type = other RNA
  modified_base 1: mod_base = OTHER; note = 2'-O-methyl modified nucleotide with thiophosphate linkage
  modified_base 2: mod_base = OTHER; note = 2'-O-methyl modified nucleotide with thiophosphate linkage
  modified_base 3: mod_base = OTHER; note = 2'-O-methyl modified nucleotide
  modified_base 4: mod_base = OTHER; note = 2'-O-methyl modified nucleotide
  modified_base 5: mod_base = OTHER; note = 2'-O-methyl modified nucleotide
  modified_base 6: mod_base = OTHER; note = 2'-O-methyl modified nucleotide
  modified_base 7: mod_base = OTHER; note = 2'-O-methyl modified nucleotide
  modified_base 8: mod_base = OTHER; note = 2'-O-methyl modified nucleotide
  modified_base 9: mod_base = OTHER; note = 2'-fluoro modified nucleotide
  modified_base 10: mod_base = OTHER; note = 2'-O-methyl modified nucleotide
  modified_base 11: mod_base = OTHER; note = 2'-fluoro modified nucleotide
  modified_base 12: mod_base = OTHER; note = 2'-O-methyl modified nucleotide
  modified_base 13: mod_base = OTHER; note = 2'-fluoro modified nucleotide
  modified_base 14: mod_base = OTHER; note = 2'-O-methyl modified nucleotide
  modified_base 15: mod_base = OTHER; note = 2'-O-methyl modified nucleotide
  modified_base 16: mod_base = OTHER; note = 2'-O-methyl modified nucleotide
  modified_base 17: mod_base = OTHER; note = 2'-O-methyl modified nucleotide
  modified_base 18: mod_base = OTHER; note = 2'-O-methyl modified nucleotide
  modified_base 19: mod_base = OTHER; note = 2'-O-methyl modified nucleotide
  modified_base 20: mod_base = OTHER; note = 2'-O-methyl modified nucleotide with thiophosphate linkage
  modified_base 21: mod_base = OTHER; note = 2'-O-methyl modified nucleotide
gagagttatcgaggcacataa

SEQ ID NO: 726 - RNA, 21 nt, synthetic construct
  source 1..21: mol_type = other RNA
  modified_base 1: mod_base = OTHER; note = 2'-O-methyl modified nucleotide with thiophosphate linkage
  modified_base 2: mod_base = OTHER; note = 2'-O-methyl modified nucleotide with thiophosphate linkage
  modified_base 3: mod_base = OTHER; note = 2'-O-methyl modified nucleotide
  modified_base 4: mod_base = OTHER; note = 2'-O-methyl modified nucleotide
  modified_base 5: mod_base = OTHER; note = 2'-O-methyl modified nucleotide
  modified_base 6: mod_base = OTHER; note = 2'-O-methyl modified nucleotide
  modified_base 7: mod_base = OTHER; note = 2'-O-methyl modified nucleotide
  modified_base 8: mod_base = OTHER; note = 2'-O-methyl modified nucleotide
  modified_base 9: mod_base = OTHER; note = 2'-fluoro modified nucleotide
  modified_base 10: mod_base = OTHER; note = 2'-O-methyl modified nucleotide
  modified_base 11: mod_base = OTHER; note = 2'-fluoro modified nucleotide
  modified_base 12: mod_base = OTHER; note = 2'-O-methyl modified nucleotide
  modified_base 13: mod_base = OTHER; note = 2'-fluoro modified nucleotide
  modified_base 14: mod_base = OTHER; note = 2'-O-methyl modified nucleotide
  modified_base 15: mod_base = OTHER; note = 2'-O-methyl modified nucleotide
  modified_base 16: mod_base = OTHER; note = 2'-O-methyl modified nucleotide
  modified_base 17: mod_base = OTHER; note = 2'-O-methyl modified nucleotide
  modified_base 18: mod_base = OTHER; note = 2'-O-methyl modified nucleotide
  modified_base 19: mod_base = OTHER; note = 2'-O-methyl modified nucleotide
  modified_base 20: mod_base = OTHER; note = 2'-O-methyl modified nucleotide with thiophosphate linkage
  modified_base 21: mod_base = OTHER; note = 2'-O-methyl modified nucleotide
gagagttatcgaggcacataa

SEQ ID NO: 727 - RNA, 21 nt, synthetic construct
  source 1..21: mol_type = other RNA
  modified_base 1: mod_base = OTHER; note = 2'-O-methyl modified nucleotide with thiophosphate linkage
  modified_base 2: mod_base = OTHER; note = 2'-O-methyl modified nucleotide with thiophosphate linkage
  modified_base 3: mod_base = OTHER; note = 2'-O-methyl modified nucleotide
  modified_base 4: mod_base = OTHER; note = 2'-O-methyl modified nucleotide
  modified_base 5: mod_base = OTHER; note = 2'-O-methyl modified nucleotide
  modified_base 6: mod_base = OTHER; note = 2'-O-methyl modified nucleotide
  modified_base 7: mod_base = OTHER; note = 2'-O-methyl modified nucleotide
  modified_base 8: mod_base = OTHER; note = 2'-O-methyl modified nucleotide
  modified_base 9: mod_base = OTHER; note = 2'-fluoro modified nucleotide
  modified_base 10: mod_base = OTHER; note = 2'-O-methyl modified nucleotide
  modified_base 11: mod_base = OTHER; note = 2'-fluoro modified nucleotide
  modified_base 12: mod_base = OTHER; note = 2'-O-methyl modified nucleotide
  modified_base 13: mod_base = OTHER; note = 2'-fluoro modified nucleotide
  modified_base 14: mod_base = OTHER; note = 2'-O-methyl modified nucleotide
  modified_base 15: mod_base = OTHER; note = 2'-O-methyl modified nucleotide
  modified_base 16: mod_base = OTHER; note = 2'-O-methyl modified nucleotide
  modified_base 17: mod_base = OTHER; note = 2'-O-methyl modified nucleotide
  modified_base 18: mod_base = OTHER; note = 2'-O-methyl modified nucleotide
  modified_base 19: mod_base = OTHER; note = 2'-O-methyl modified nucleotide
  modified_base 20: mod_base = OTHER; note = 2'-O-methyl modified nucleotide with thiophosphate linkage
  modified_base 21: mod_base = OTHER; note = 2'-O-methyl modified nucleotide
gagagttatcgaggcacataa

SEQ ID NO: 728 - RNA, 21 nt, synthetic construct
  source 1..21: mol_type = other RNA
  modified_base 1: mod_base = OTHER; note = 2'-O-methyl modified nucleotide with thiophosphate linkage
  modified_base 2: mod_base = OTHER; note = 2'-O-methyl modified nucleotide with thiophosphate linkage
  modified_base 3: mod_base = OTHER; note = 2'-O-methyl modified nucleotide
  modified_base 4: mod_base = OTHER; note = 2'-O-methyl modified nucleotide
  modified_base 5: mod_base = OTHER; note = 2'-O-methyl modified nucleotide
  modified_base 6: mod_base = OTHER; note = 2'-O-methyl modified nucleotide
  modified_base 7: mod_base = OTHER; note = 2'-O-methyl modified nucleotide
  modified_base 8: mod_base = OTHER; note = 2'-O-methyl modified nucleotide
  modified_base 9: mod_base = OTHER; note = 2'-fluoro modified nucleotide
  modified_base 10: mod_base = OTHER; note = 2'-O-methyl modified nucleotide
  modified_base 11: mod_base = OTHER; note = 2'-fluoro modified nucleotide
  modified_base 12: mod_base = OTHER; note = 2'-O-methyl modified nucleotide
  modified_base 13: mod_base = OTHER; note = 2'-fluoro modified nucleotide
  modified_base 14: mod_base = OTHER; note = 2'-O-methyl modified nucleotide
  modified_base 15: mod_base = OTHER; note = 2'-O-methyl modified nucleotide
  modified_base 16: mod_base = OTHER; note = 2'-O-methyl modified nucleotide
  modified_base 17: mod_base = OTHER; note = 2'-O-methyl modified nucleotide
  modified_base 18: mod_base = OTHER; note = 2'-O-methyl modified nucleotide
  modified_base 19: mod_base = OTHER; note = 2'-O-methyl modified nucleotide
  modified_base 20: mod_base = OTHER; note = 2'-O-methyl modified nucleotide with thiophosphate linkage
  modified_base 21: mod_base = OTHER; note = 2'-O-methyl modified nucleotide
gagagttatcgaggcacataa

SEQ ID NO: 729 - RNA, 21 nt, synthetic construct
  source 1..21: mol_type = other RNA
  modified_base 1: mod_base = OTHER; note = 2'-O-methyl modified nucleotide with thiophosphate linkage
  modified_base 2: mod_base = OTHER; note = 2'-O-methyl modified nucleotide with thiophosphate linkage
  modified_base 3: mod_base = OTHER; note = 2'-O-methyl modified nucleotide
  modified_base 4: mod_base = OTHER; note = 2'-O-methyl modified nucleotide
  modified_base 5: mod_base = OTHER; note = 2'-O-methyl modified nucleotide
  modified_base 6: mod_base = OTHER; note = 2'-O-methyl modified nucleotide
  modified_base 7: mod_base = OTHER; note = 2'-O-methyl modified nucleotide
  modified_base 8: mod_base = OTHER; note = 2'-O-methyl modified nucleotide
  modified_base 9: mod_base = OTHER; note = 2'-fluoro modified nucleotide
  modified_base 10: mod_base = OTHER; note = 2'-fluoro modified nucleotide
  modified_base 11: mod_base = OTHER; note = 2'-fluoro modified nucleotide
  modified_base 12: mod_base = OTHER; note = 2'-O-methyl modified nucleotide
  modified_base 13: mod_base = OTHER; note = 2'-O-methyl modified nucleotide
  modified_base 14: mod_base = OTHER; note = 2'-O-methyl modified nucleotide
  modified_base 15: mod_base = OTHER; note = 2'-O-methyl modified nucleotide
  modified_base 16: mod_base = OTHER; note = 2'-O-methyl modified nucleotide
  modified_base 17: mod_base = OTHER; note = 2'-O-methyl modified nucleotide
  modified_base 18: mod_base = OTHER; note = 2'-O-methyl modified nucleotide
  modified_base 19: mod_base = OTHER; note = 2'-O-methyl modified nucleotide
  modified_base 20: mod_base = OTHER; note = 2'-O-methyl modified nucleotide with thiophosphate linkage
  modified_base 21: mod_base = OTHER; note = 2'-O-methyl modified nucleotide
gagagttatcgaggcacataa

SEQ ID NO: 730 - RNA, 21 nt, synthetic construct
  source 1..21: mol_type = other RNA
  modified_base 1: mod_base = OTHER; note = 2'-O-methyl modified nucleotide with thiophosphate linkage
  modified_base 2: mod_base = OTHER; note = 2'-O-methyl modified nucleotide with thiophosphate linkage
  modified_base 3: mod_base = OTHER; note = 2'-O-methyl modified nucleotide
  modified_base 4: mod_base = OTHER; note = 2'-O-methyl modified nucleotide
  modified_base 5: mod_base = OTHER; note = 2'-O-methyl modified nucleotide
  modified_base 6: mod_base = OTHER; note = 2'-O-methyl modified nucleotide
  modified_base 7: mod_base = OTHER; note = 2'-O-methyl modified nucleotide
  modified_base 8: mod_base = OTHER; note = 2'-O-methyl modified nucleotide
  modified_base 9: mod_base = OTHER; note = 2'-fluoro modified nucleotide
  modified_base 10: mod_base = OTHER; note = 2'-O-methyl modified nucleotide
  modified_base 11: mod_base = OTHER; note = 2'-fluoro modified nucleotide
  modified_base 12: mod_base = OTHER; note = 2'-O-methyl modified nucleotide
  modified_base 13: mod_base = OTHER; note = 2'-fluoro modified nucleotide
  modified_base 14: mod_base = OTHER; note = 2'-O-methyl modified nucleotide
  modified_base 15: mod_base = OTHER; note = 2'-O-methyl modified nucleotide
  modified_base 16: mod_base = OTHER; note = 2'-O-methyl modified nucleotide
  modified_base 17: mod_base = OTHER; note = 2'-O-methyl modified nucleotide
  modified_base 18: mod_base = OTHER; note = 2'-O-methyl modified nucleotide
  modified_base 19: mod_base = OTHER; note = 2'-O-methyl modified nucleotide
  modified_base 20: mod_base = OTHER; note = 2'-O-methyl modified nucleotide with thiophosphate linkage
  modified_base 21: mod_base = OTHER; note = 2'-O-methyl modified nucleotide
gagagttatcgaggcgcataa

SEQ ID NO: 731 - RNA, 21 nt, synthetic construct
  source 1..21: mol_type = other RNA
  modified_base 1: mod_base = OTHER; note = 2'-O-methyl modified nucleotide with thiophosphate linkage
  modified_base 2: mod_base = OTHER; note = 2'-O-methyl modified nucleotide with thiophosphate linkage
  modified_base 3: mod_base = OTHER; note = 2'-O-methyl modified nucleotide
  modified_base 4: mod_base = OTHER; note = 2'-O-methyl modified nucleotide
  modified_base 5: mod_base = OTHER; note = 2'-O-methyl modified nucleotide
  modified_base 6: mod_base = OTHER; note = 2'-O-methyl modified nucleotide
  modified_base 7: mod_base = OTHER; note = 2'-O-methyl modified nucleotide
  modified_base 8: mod_base = OTHER; note = 2'-O-methyl modified nucleotide
  modified_base 9: mod_base = OTHER; note = 2'-fluoro modified nucleotide
  modified_base 10: mod_base = OTHER; note = 2'-O-methyl modified nucleotide
  modified_base 11: mod_base = OTHER; note = 2'-fluoro modified nucleotide
  modified_base 12: mod_base = OTHER; note = 2'-O-methyl modified nucleotide
  modified_base 13: mod_base = OTHER; note = 2'-fluoro modified nucleotide
  modified_base 14: mod_base = OTHER; note = 2'-O-methyl modified nucleotide
  modified_base 15: mod_base = OTHER; note = 2'-O-methyl modified nucleotide
  modified_base 16: mod_base = OTHER; note = 2'-O-methyl modified nucleotide
  modified_base 17: mod_base = OTHER; note = 2'-O-methyl modified nucleotide
  modified_base 18: mod_base = OTHER; note = 2'-O-methyl modified nucleotide
  modified_base 19: mod_base = OTHER; note = 2'-O-methyl modified nucleotide
  modified_base 20: mod_base = OTHER; note = 2'-O-methyl modified nucleotide with thiophosphate linkage
  modified_base 21: mod_base = OTHER; note = 2'-O-methyl modified nucleotide
gagagttatcgaggcacatta

SEQ ID NO: 732 - RNA, 21 nt, synthetic construct
  source 1..21: mol_type = other RNA
  modified_base 1: mod_base = OTHER; note = 2'-O-methyl modified nucleotide with thiophosphate linkage
  modified_base 2: mod_base = OTHER; note = 2'-O-methyl modified nucleotide with thiophosphate linkage
  modified_base 3: mod_base = OTHER; note = 2'-O-methyl modified nucleotide
  modified_base 4: mod_base = OTHER; note = 2'-O-methyl modified nucleotide
  modified_base 5: mod_base = OTHER; note = 2'-O-methyl modified nucleotide
  modified_base 6: mod_base = OTHER; note = 2'-O-methyl modified nucleotide
  modified_base 7: mod_base = OTHER; note = 2'-O-methyl modified nucleotide
  modified_base 8: mod_base = OTHER; note = 2'-O-methyl modified nucleotide
  modified_base 9: mod_base = OTHER; note = 2'-fluoro modified nucleotide
  modified_base 10: mod_base = OTHER; note = 2'-O-methyl modified nucleotide
  modified_base 11: mod_base = OTHER; note = 2'-fluoro modified nucleotide
  modified_base 12: mod_base = OTHER; note = 2'-O-methyl modified nucleotide
  modified_base 13: mod_base = OTHER; note = 2'-fluoro modified nucleotide
  modified_base 14: mod_base = OTHER; note = 2'-O-methyl modified nucleotide
  modified_base 15: mod_base = OTHER; note = 2'-O-methyl modified nucleotide
  modified_base 16: mod_base = OTHER; note = 2'-O-methyl modified nucleotide
  modified_base 17: mod_base = OTHER; note = 2'-O-methyl modified nucleotide
  modified_base 18: mod_base = OTHER; note = 2'-O-methyl modified nucleotide
  modified_base 19: mod_base = OTHER; note = 2'-O-methyl modified nucleotide with thiophosphate linkage
  modified_base 20: mod_base = OTHER; note = 2'-O-methyl modified nucleotide with thiophosphate linkage
  modified_base 21: mod_base = OTHER; note = 2'-O-methyl modified nucleotide
gagagttatcgaggcacataa

SEQ ID NO: 733 - RNA, 21 nt, synthetic construct
  source 1..21: mol_type = other RNA
  modified_base 1: mod_base = OTHER; note = 2'-O-methyl modified nucleotide with thiophosphate linkage
  modified_base 2: mod_base = OTHER; note = 2'-O-methyl modified nucleotide with thiophosphate linkage
  modified_base 3: mod_base = OTHER; note = 2'-O-methyl modified nucleotide
  modified_base 4: mod_base = OTHER; note = 2'-O-methyl modified nucleotide
  modified_base 5: mod_base = OTHER; note = 2'-O-methyl modified nucleotide
  modified_base 6: mod_base = OTHER; note = 2'-O-methyl modified nucleotide
  modified_base 7: mod_base = OTHER; note = 2'-O-methyl modified nucleotide
  modified_base 8: mod_base = OTHER; note = 2'-O-methyl modified nucleotide
  modified_base 9: mod_base = OTHER; note = 2'-fluoro modified nucleotide
  modified_base 10: mod_base = OTHER; note = 2'-O-methyl modified nucleotide
  modified_base 11: mod_base = OTHER; note = 2'-fluoro modified nucleotide
  modified_base 12: mod_base = OTHER; note = 2'-O-methyl modified nucleotide
  modified_base 13: mod_base = OTHER; note = 2'-fluoro modified nucleotide
  modified_base 14: mod_base = OTHER; note = 2'-O-methyl modified nucleotide
  modified_base 15: mod_base = OTHER; note = 2'-O-methyl modified nucleotide
  modified_base 16: mod_base = OTHER; note = 2'-O-methyl modified nucleotide
  modified_base 17: mod_base = OTHER; note = 2'-O-methyl modified nucleotide
  modified_base 18: mod_base = OTHER; note = 2'-O-methyl modified nucleotide
  modified_base 19: mod_base = OTHER; note = 2'-O-methyl modified nucleotide
  modified_base 20: mod_base = OTHER; note = 2'-O-methyl modified nucleotide with thiophosphate linkage
  modified_base 21: mod_base = OTHER; note = 2'-O-methyl modified nucleotide
gttgccaagcttggtcatcta

SEQ ID NO: 734 - RNA, 21 nt, synthetic construct
  source 1..21: mol_type = other RNA
  modified_base 1: mod_base = OTHER; note = 2'-O-methyl modified nucleotide with thiophosphate linkage
  modified_base 2: mod_base = OTHER; note = 2'-O-methyl modified nucleotide with thiophosphate linkage
  modified_base 3: mod_base = OTHER; note = 2'-O-methyl modified nucleotide
  modified_base 4: mod_base = OTHER; note = 2'-O-methyl modified nucleotide
  modified_base 5: mod_base = OTHER; note = 2'-O-methyl modified nucleotide
  modified_base 6: mod_base = OTHER; note = 2'-O-methyl modified nucleotide
  modified_base 7: mod_base = OTHER; note = 2'-O-methyl modified nucleotide
  modified_base 8: mod_base = OTHER; note = 2'-O-methyl modified nucleotide
  modified_base 9: mod_base = OTHER; note = 2'-fluoro modified nucleotide
  modified_base 10: mod_base = OTHER; note = 2'-O-methyl modified nucleotide
  modified_base 11: mod_base = OTHER; note = 2'-fluoro modified nucleotide
  modified_base 12: mod_base = OTHER; note = 2'-O-methyl modified nucleotide
  modified_base 13: mod_base = OTHER; note = 2'-fluoro modified nucleotide
  modified_base 14: mod_base = OTHER; note = 2'-O-methyl modified nucleotide
  modified_base 15: mod_base = OTHER; note = 2'-O-methyl modified nucleotide
  modified_base 16: mod_base = OTHER; note = 2'-O-methyl modified nucleotide
  modified_base 17: mod_base = OTHER; note = 2'-O-methyl modified nucleotide
  modified_base 18: mod_base = OTHER; note = 2'-O-methyl modified nucleotide
  modified_base 19: mod_base = OTHER; note = 2'-O-methyl modified nucleotide
  modified_base 20: mod_base = OTHER; note = 2'-O-methyl modified nucleotide with thiophosphate linkage
  modified_base 21: mod_base = OTHER; note = 2'-O-methyl modified nucleotide
gttgccaagcttggtcatctt

SEQ ID NO: 735 - RNA, 21 nt, synthetic construct
  source 1..21: mol_type = other RNA
  modified_base 1: mod_base = OTHER; note = 2'-O-methyl modified nucleotide with thiophosphate linkage
  modified_base 2: mod_base = OTHER; note = 2'-O-methyl modified nucleotide with thiophosphate linkage
  modified_base 3: mod_base = OTHER; note = 2'-O-methyl modified nucleotide
  modified_base 4: mod_base = OTHER; note = 2'-O-methyl modified nucleotide
  modified_base 5: mod_base = OTHER; note = 2'-O-methyl modified nucleotide
  modified_base 6: mod_base = OTHER; note = 2'-O-methyl modified nucleotide
  modified_base 7: mod_base = OTHER; note = 2'-O-methyl modified nucleotide
  modified_base 8: mod_base = OTHER; note = 2'-O-methyl modified nucleotide
  modified_base 9: mod_base = OTHER; note = 2'-fluoro modified nucleotide
  modified_base 10: mod_base = OTHER; note = 2'-O-methyl modified nucleotide
  modified_base 11: mod_base = OTHER; note = 2'-fluoro modified nucleotide
  modified_base 12: mod_base = OTHER; note = 2'-O-methyl modified nucleotide
  modified_base 13: mod_base = OTHER; note = 2'-fluoro modified nucleotide
  modified_base 14: mod_base = OTHER; note = 2'-O-methyl modified nucleotide
  modified_base 15: mod_base = OTHER; note = 2'-O-methyl modified nucleotide
  modified_base 16: mod_base = OTHER; note = 2'-O-methyl modified nucleotide
  modified_base 17: mod_base = OTHER; note = 2'-O-methyl modified nucleotide
  modified_base 18: mod_base = OTHER; note = 2'-O-methyl modified nucleotide
  modified_base 19: mod_base = OTHER; note = 2'-O-methyl modified nucleotide
  modified_base 20: mod_base = OTHER; note = 2'-O-methyl modified nucleotide with thiophosphate linkage
  modified_base 21: mod_base = OTHER; note = 2'-O-methyl modified nucleotide
gttgccaagcttggtcatctc

SEQ ID NO: 736 - RNA, 21 nt, synthetic construct
  source 1..21: mol_type = other RNA
  modified_base 1: mod_base = OTHER; note = 2'-O-methyl modified nucleotide with thiophosphate linkage
  modified_base 2: mod_base = OTHER; note = 2'-O-methyl modified nucleotide with thiophosphate linkage
  modified_base 3: mod_base = OTHER; note = 2'-O-methyl modified nucleotide
  modified_base 4: mod_base = OTHER; note = 2'-O-methyl modified nucleotide
  modified_base 5: mod_base = OTHER; note = 2'-O-methyl modified nucleotide
  modified_base 6: mod_base = OTHER; note = 2'-O-methyl modified nucleotide
  modified_base 7: mod_base = OTHER; note = 2'-O-methyl modified nucleotide
  modified_base 8: mod_base = OTHER; note = 2'-O-methyl modified nucleotide
  modified_base 9: mod_base = OTHER; note = 2'-fluoro modified nucleotide
  modified_base 10: mod_base = OTHER; note = 2'-O-methyl modified nucleotide
  modified_base 11: mod_base = OTHER; note = 2'-fluoro modified nucleotide
  modified_base 12: mod_base = OTHER; note = 2'-O-methyl modified nucleotide
  modified_base 13: mod_base = OTHER; note = 2'-fluoro modified nucleotide
  modified_base 14: mod_base = OTHER; note = 2'-O-methyl modified nucleotide
  modified_base 15: mod_base = OTHER; note = 2'-O-methyl modified nucleotide
  modified_base 16: mod_base = OTHER; note = 2'-O-methyl modified nucleotide
  modified_base 17: mod_base = OTHER; note = 2'-O-methyl modified nucleotide
  modified_base 18: mod_base = OTHER; note = 2'-O-methyl modified nucleotide
  modified_base 19: mod_base = OTHER; note = 2'-O-methyl modified nucleotide
  modified_base 20: mod_base = OTHER; note = 2'-O-methyl modified nucleotide with thiophosphate linkage
  modified_base 21: mod_base = OTHER; note = 2'-O-methyl modified nucleotide
gttgccaagcttggtcatctg

SEQ ID NO: 737 - RNA, 17 nt, synthetic construct
  source 1..17: mol_type = other RNA
  modified_base 1: mod_base = OTHER; note = 2'-O-methyl modified nucleotide with thiophosphate linkage
  modified_base 2: mod_base = OTHER; note = 2'-O-methyl modified nucleotide with thiophosphate linkage
  modified_base 3: mod_base = OTHER; note = 2'-O-methyl modified nucleotide
  modified_base 4: mod_base = OTHER; note = 2'-O-methyl modified nucleotide
  modified_base 5: mod_base = OTHER; note = 2'-fluoro modified nucleotide
  modified_base 6: mod_base = OTHER; note = 2'-O-methyl modified nucleotide
  modified_base 7: mod_base = OTHER; note = 2'-fluoro modified nucleotide
  modified_base 8: mod_base = OTHER; note = 2'-O-methyl modified nucleotide
  modified_base 9: mod_base = OTHER; note = 2'-fluoro modified nucleotide
  modified_base 10: mod_base = OTHER; note = 2'-O-methyl modified nucleotide
  modified_base 11: mod_base = OTHER; note = 2'-O-methyl modified nucleotide
  modified_base 12: mod_base = OTHER; note = 2'-O-methyl modified nucleotide
  modified_base 13: mod_base = OTHER; note = 2'-O-methyl modified nucleotide
  modified_base 14: mod_base = OTHER; note = 2'-O-methyl modified nucleotide
  modified_base 15: mod_base = OTHER; note = 2'-O-methyl modified nucleotide
  modified_base 16: mod_base = OTHER; note = 2'-O-methyl modified nucleotide with thiophosphate linkage
  modified_base 17: mod_base = OTHER; note = 2'-O-methyl modified nucleotide
ccaagcttggtcatcta

SEQ ID NO: 738 - RNA, 18 nt, synthetic construct
  source 1..18: mol_type = other RNA
  modified_base 1: mod_base = OTHER; note = 2'-O-methyl modified nucleotide with thiophosphate linkage
  modified_base 2: mod_base = OTHER; note = 2'-O-methyl modified nucleotide with thiophosphate linkage
  modified_base 3: mod_base = OTHER; note = 2'-O-methyl modified nucleotide
  modified_base 4: mod_base = OTHER; note = 2'-O-methyl modified nucleotide
  modified_base 5: mod_base = OTHER; note = 2'-O-methyl modified nucleotide
  modified_base 6: mod_base = OTHER; note = 2'-fluoro modified nucleotide
  modified_base 7: mod_base = OTHER; note = 2'-O-methyl modified nucleotide
  modified_base 8: mod_base = OTHER; note = 2'-fluoro modified nucleotide
  modified_base 9: mod_base = OTHER; note = 2'-O-methyl modified nucleotide
  modified_base 10: mod_base = OTHER; note = 2'-fluoro modified nucleotide
  modified_base 11: mod_base = OTHER; note = 2'-O-methyl modified nucleotide
  modified_base 12: mod_base = OTHER; note = 2'-O-methyl modified nucleotide
  modified_base 13: mod_base = OTHER; note = 2'-O-methyl modified nucleotide
  modified_base 14: mod_base = OTHER; note = 2'-O-methyl modified nucleotide
  modified_base 15: mod_base = OTHER; note = 2'-O-methyl modified nucleotide
  modified_base 16: mod_base = OTHER; note = 2'-O-methyl modified nucleotide
  modified_base 17: mod_base = OTHER; note = 2'-O-methyl modified nucleotide with thiophosphate linkage
  modified_base 18: mod_base = OTHER; note = 2'-O-methyl modified nucleotide
gccaagcttggtcatcta

SEQ ID NO: 739 - RNA, 19 nt, synthetic construct
  source 1..19: mol_type = other RNA
  modified_base 1: mod_base = OTHER; note = 2'-O-methyl modified nucleotide with thiophosphate linkage
  modified_base 2: mod_base = OTHER; note = 2'-O-methyl modified nucleotide with thiophosphate linkage
  modified_base 3: mod_base = OTHER; note = 2'-O-methyl modified nucleotide
  modified_base 4: mod_base = OTHER; note = 2'-O-methyl modified nucleotide
  modified_base 5: mod_base = OTHER; note = 2'-O-methyl modified nucleotide
  modified_base 6: mod_base = OTHER; note = 2'-O-methyl modified nucleotide
  modified_base 7: mod_base = OTHER; note = 2'-fluoro modified nucleotide
  modified_base 8: mod_base = OTHER; note = 2'-O-methyl modified nucleotide
  modified_base 9: mod_base = OTHER; note = 2'-fluoro modified nucleotide
  modified_base 10: mod_base = OTHER; note = 2'-O-methyl modified nucleotide
  modified_base 11: mod_base = OTHER; note = 2'-fluoro modified nucleotide
  modified_base 12: mod_base = OTHER; note = 2'-O-methyl modified nucleotide
  modified_base 13: mod_base = OTHER; note = 2'-O-methyl modified nucleotide
  modified_base 14: mod_base = OTHER; note = 2'-O-methyl modified nucleotide
  modified_base 15: mod_base = OTHER; note = 2'-O-methyl modified nucleotide
  modified_base 16: mod_base = OTHER; note = 2'-O-methyl modified nucleotide
  modified_base 17: mod_base = OTHER; note = 2'-O-methyl modified nucleotide
  modified_base 18: mod_base = OTHER; note = 2'-O-methyl modified nucleotide with thiophosphate linkage
  modified_base 19: mod_base = OTHER; note = 2'-O-methyl modified nucleotide
agccaagcttggtcatcta

SEQ ID NO: 740 - RNA, 19 nt, synthetic construct
  source 1..19: mol_type = other RNA
  modified_base 1: mod_base = OTHER; note = 2'-O-methyl modified nucleotide with thiophosphate linkage
  modified_base 2: mod_base = OTHER; note = 2'-O-methyl modified nucleotide with thiophosphate linkage
  modified_base 3: mod_base = OTHER; note = 2'-O-methyl modified nucleotide
  modified_base 4: mod_base = OTHER; note = 2'-O-methyl modified nucleotide
  modified_base 5: mod_base = OTHER; note = 2'-O-methyl modified nucleotide
  modified_base 6: mod_base = OTHER; note = 2'-O-methyl modified nucleotide
  modified_base 7: mod_base = OTHER; note = 2'-fluoro modified nucleotide
  modified_base 8: mod_base = OTHER; note = 2'-O-methyl modified nucleotide
  modified_base 9: mod_base = OTHER; note = 2'-fluoro modified nucleotide
  modified_base 10: mod_base = OTHER; note = 2'-O-methyl modified nucleotide
  modified_base 11: mod_base = OTHER; note = 2'-fluoro modified nucleotide
  modified_base 12: mod_base = OTHER; note = 2'-O-methyl modified nucleotide
  modified_base 13: mod_base = OTHER; note = 2'-O-methyl modified nucleotide
  modified_base 14: mod_base = OTHER; note = 2'-O-methyl modified nucleotide
  modified_base 15: mod_base = OTHER; note = 2'-O-methyl modified nucleotide
  modified_base 16: mod_base = OTHER; note = 2'-O-methyl modified nucleotide
  modified_base 17: mod_base = OTHER; note = 2'-O-methyl modified nucleotide
  modified_base 18: mod_base = OTHER; note = 2'-O-methyl modified nucleotide with thiophosphate linkage
  modified_base 19: mod_base = OTHER; note = 2'-O-methyl modified nucleotide
tgccaagcttggtcatcta

SEQ ID NO: 741 - RNA, 19 nt, synthetic construct
  source 1..19: mol_type = other RNA
  modified_base 1: mod_base = OTHER; note = 2'-O-methyl modified nucleotide with thiophosphate linkage
  modified_base 2: mod_base = OTHER; note = 2'-O-methyl modified nucleotide with thiophosphate linkage
  modified_base 3: mod_base = OTHER; note = 2'-O-methyl modified nucleotide
  modified_base 4: mod_base = OTHER; note = 2'-O-methyl modified nucleotide
  modified_base 5: mod_base = OTHER; note = 2'-O-methyl modified nucleotide
  modified_base 6: mod_base = OTHER; note = 2'-O-methyl modified nucleotide
  modified_base 7: mod_base = OTHER; note = 2'-fluoro modified nucleotide
  modified_base 8: mod_base = OTHER; note = 2'-O-methyl modified nucleotide
  modified_base 9: mod_base = OTHER; note = 2'-fluoro modified nucleotide
  modified_base 10: mod_base = OTHER; note = 2'-O-methyl modified nucleotide
  modified_base 11: mod_base = OTHER; note = 2'-fluoro modified nucleotide
  modified_base 12: mod_base = OTHER; note = 2'-O-methyl modified nucleotide
  modified_base 13: mod_base = OTHER; note = 2'-O-methyl modified nucleotide
  modified_base 14: mod_base = OTHER; note = 2'-O-methyl modified nucleotide
  modified_base 15: mod_base = OTHER; note = 2'-O-methyl modified nucleotide
  modified_base 16: mod_base = OTHER; note = 2'-O-methyl modified nucleotide
  modified_base 17: mod_base = OTHER; note = 2'-O-methyl modified nucleotide
  modified_base 18: mod_base = OTHER; note = 2'-O-methyl modified nucleotide with thiophosphate linkage
  modified_base 19: mod_base = OTHER; note = 2'-O-methyl modified nucleotide
ggccaagcttggtcatcta

SEQ ID NO: 742 - RNA, 19 nt, synthetic construct
  source 1..19: mol_type = other RNA
  modified_base 1: mod_base = OTHER; note = 2'-O-methyl modified nucleotide with thiophosphate linkage
  modified_base 2: mod_base = OTHER; note = 2'-O-methyl modified nucleotide with thiophosphate linkage
  modified_base 3: mod_base = OTHER; note = 2'-O-methyl modified nucleotide
  modified_base 4: mod_base = OTHER; note = 2'-O-methyl modified nucleotide
  modified_base 5: mod_base = OTHER; note = 2'-O-methyl modified nucleotide
  modified_base 6: mod_base = OTHER; note = 2'-O-methyl modified nucleotide
  modified_base 7: mod_base = OTHER; note = 2'-fluoro modified nucleotide
  modified_base 8: mod_base = OTHER; note = 2'-O-methyl modified nucleotide
  modified_base 9: mod_base = OTHER; note = 2'-fluoro modified nucleotide
  modified_base 10: mod_base = OTHER; note = 2'-O-methyl modified nucleotide
  modified_base 11: mod_base = OTHER; note = 2'-fluoro modified nucleotide
  modified_base 12: mod_base = OTHER; note = 2'-O-methyl modified nucleotide
  modified_base 13: mod_base = OTHER; note = 2'-O-methyl modified nucleotide
  modified_base 14: mod_base = OTHER; note = 2'-O-methyl modified nucleotide
  modified_base 15: mod_base = OTHER; note = 2'-O-methyl modified nucleotide
  modified_base 16: mod_base = OTHER; note = 2'-O-methyl modified nucleotide
  modified_base 17: mod_base = OTHER; note = 2'-O-methyl modified nucleotide
  modified_base 18: mod_base = OTHER; note = 2'-O-methyl modified nucleotide with thiophosphate linkage
  modified_base 19: mod_base = OTHER; note = 2'-O-methyl modified nucleotide
cgccaagcttggtcatcta

SEQ ID NO: 743 - RNA, 20 nt, synthetic construct
  source 1..20: mol_type = other RNA
  modified_base 1: mod_base = OTHER; note = 2'-O-methyl modified nucleotide with thiophosphate linkage
  modified_base 2: mod_base = OTHER; note = 2'-O-methyl modified nucleotide with thiophosphate linkage
  modified_base 3: mod_base = OTHER; note = 2'-O-methyl modified nucleotide
  modified_base 4: mod_base = OTHER; note = 2'-O-methyl modified nucleotide
  modified_base 5: mod_base = OTHER; note = 2'-O-methyl modified nucleotide
  modified_base 6: mod_base = OTHER; note = 2'-O-methyl modified nucleotide
  modified_base 7: mod_base = OTHER; note = 2'-O-methyl modified nucleotide
  modified_base 8: mod_base = OTHER; note = 2'-fluoro modified nucleotide
  modified_base 9: mod_base = OTHER; note = 2'-O-methyl modified nucleotide
  modified_base 10: mod_base = OTHER; note = 2'-fluoro modified nucleotide
  modified_base 11: mod_base = OTHER; note = 2'-O-methyl modified nucleotide
  modified_base 12: mod_base = OTHER; note = 2'-fluoro modified nucleotide
  modified_base 13: mod_base = OTHER; note = 2'-O-methyl modified nucleotide
  modified_base 14: mod_base = OTHER; note = 2'-O-methyl modified nucleotide
  modified_base 15: mod_base = OTHER; note = 2'-O-methyl modified nucleotide
  modified_base 16: mod_base = OTHER; note = 2'-O-methyl modified nucleotide
  modified_base 17: mod_base = OTHER; note = 2'-O-methyl modified nucleotide
  modified_base 18: mod_base = OTHER; note = 2'-O-methyl modified nucleotide
  modified_base 19: mod_base = OTHER; note = 2'-O-methyl modified nucleotide with thiophosphate linkage
  modified_base 20: mod_base = OTHER; note = 2'-O-methyl modified nucleotide
atgccaagcttggtcatcta

SEQ ID NO: 744 - RNA, 20 nt, synthetic construct
  source 1..20: mol_type = other RNA
  modified_base 1: mod_base = OTHER; note = 2'-O-methyl modified nucleotide with thiophosphate linkage
  modified_base 2: mod_base = OTHER; note = 2'-O-methyl modified nucleotide with thiophosphate linkage
  modified_base 3: mod_base = OTHER; note = 2'-O-methyl modified nucleotide
  modified_base 4: mod_base = OTHER; note = 2'-O-methyl modified nucleotide
  modified_base 5: mod_base = OTHER; note = 2'-O-methyl modified nucleotide
  modified_base 6: mod_base = OTHER; note = 2'-O-methyl modified nucleotide
  modified_base 7: mod_base = OTHER; note = 2'-O-methyl modified nucleotide
  modified_base 8: mod_base = OTHER; note = 2'-fluoro modified nucleotide
  modified_base 9: mod_base = OTHER; note = 2'-O-methyl modified nucleotide
  modified_base 10: mod_base = OTHER; note = 2'-fluoro modified nucleotide
  modified_base 11: mod_base = OTHER; note = 2'-O-methyl modified nucleotide
  modified_base 12: mod_base = OTHER; note = 2'-fluoro modified nucleotide
  modified_base 13: mod_base = OTHER; note = 2'-O-methyl modified nucleotide
  modified_base 14: mod_base = OTHER; note = 2'-O-methyl modified nucleotide
  modified_base 15: mod_base = OTHER; note = 2'-O-methyl modified nucleotide
  modified_base 16: mod_base = OTHER; note = 2'-O-methyl modified nucleotide
  modified_base 17: mod_base = OTHER; note = 2'-O-methyl modified nucleotide
  modified_base 18: mod_base = OTHER; note = 2'-O-methyl modified nucleotide
  modified_base 19: mod_base = OTHER; note = 2'-O-methyl modified nucleotide with thiophosphate linkage
  modified_base 20: mod_base = OTHER; note = 2'-O-methyl modified nucleotide
ttgccaagcttggtcatcta

SEQ ID NO: 745 - RNA, 20 nt, synthetic construct
  source 1..20: mol_type = other RNA
  modified_base 1: mod_base = OTHER; note = 2'-O-methyl modified nucleotide with thiophosphate linkage
  modified_base 2: mod_base = OTHER; note = 2'-O-methyl modified nucleotide with thiophosphate linkage
  modified_base 3: mod_base = OTHER; note = 2'-O-methyl modified nucleotide
  modified_base 4: mod_base = OTHER; note = 2'-O-methyl modified nucleotide
  modified_base 5: mod_base = OTHER; note = 2'-O-methyl modified nucleotide
  modified_base 6: mod_base = OTHER; note = 2'-O-methyl modified nucleotide
  modified_base 7: mod_base = OTHER; note = 2'-O-methyl modified nucleotide
  modified_base 8: mod_base = OTHER; note = 2'-fluoro modified nucleotide
  modified_base 9: mod_base = OTHER; note = 2'-O-methyl modified nucleotide
  modified_base 10: mod_base = OTHER; note = 2'-fluoro modified nucleotide
  modified_base 11: mod_base = OTHER; note = 2'-O-methyl modified nucleotide
  modified_base 12: mod_base = OTHER; note = 2'-fluoro modified nucleotide
  modified_base 13: mod_base = OTHER; note = 2'-O-methyl modified nucleotide
  modified_base 14: mod_base = OTHER; note = 2'-O-methyl modified nucleotide
  modified_base 15: mod_base = OTHER; note = 2'-O-methyl modified nucleotide
  modified_base 16: mod_base = OTHER; note = 2'-O-methyl modified nucleotide
  modified_base 17: mod_base = OTHER; note = 2'-O-methyl modified nucleotide
  modified_base 18: mod_base = OTHER; note = 2'-O-methyl modified nucleotide
  modified_base 19: mod_base = OTHER; note = 2'-O-methyl modified nucleotide with thiophosphate linkage
  modified_base 20: mod_base = OTHER; note = 2'-O-methyl modified nucleotide
gtgccaagcttggtcatcta

SEQ ID NO: 746 - RNA, 20 nt, synthetic construct
  source 1..20: mol_type = other RNA
  modified_base 1: mod_base = OTHER; note = 2'-O-methyl modified nucleotide with thiophosphate linkage
  modified_base 2: mod_base = OTHER; note = 2'-O-methyl modified nucleotide with thiophosphate linkage
  modified_base 3: mod_base = OTHER; note = 2'-O-methyl modified nucleotide
  modified_base 4: mod_base = OTHER; note = 2'-O-methyl modified nucleotide
  modified_base 5: mod_base = OTHER; note = 2'-O-methyl modified nucleotide
  modified_base 6: mod_base = OTHER; note = 2'-O-methyl modified nucleotide
  modified_base 7: mod_base = OTHER; note = 2'-O-methyl modified nucleotide
  modified_base 8: mod_base = OTHER; note = 2'-fluoro modified nucleotide
  modified_base 9: mod_base = OTHER; note = 2'-O-methyl modified nucleotide
  modified_base 10: mod_base = OTHER; note = 2'-fluoro modified nucleotide
  modified_base 11: mod_base = OTHER; note = 2'-O-methyl modified nucleotide
  modified_base 12: mod_base = OTHER; note = 2'-fluoro modified nucleotide
  modified_base 13: mod_base = OTHER; note = 2'-O-methyl modified nucleotide
  modified_base 14: mod_base = OTHER; note = 2'-O-methyl modified nucleotide
  modified_base 15: mod_base = OTHER; note = 2'-O-methyl modified nucleotide
  modified_base 16: mod_base = OTHER; note = 2'-O-methyl modified nucleotide
  modified_base 17: mod_base = OTHER; note = 2'-O-methyl modified nucleotide
  modified_base 18: mod_base = OTHER; note = 2'-O-methyl modified nucleotide
  modified_base 19: mod_base = OTHER; note = 2'-O-methyl modified nucleotide with thiophosphate linkage
  modified_base 20: mod_base = OTHER; note = 2'-O-methyl modified nucleotide
ctgccaagcttggtcatcta

SEQ ID NO: 747 - RNA, 21 nt, synthetic construct
  source 1..21: mol_type = other RNA
  modified_base 1: mod_base = OTHER; note = 2'-O-methyl modified nucleotide with thiophosphate linkage
  modified_base 2: mod_base = OTHER; note = 2'-O-methyl modified nucleotide with thiophosphate linkage
  modified_base 3: mod_base = OTHER; note = 2'-O-methyl modified nucleotide
  modified_base 4: mod_base = OTHER; note = 2'-O-methyl modified nucleotide
  modified_base 5: mod_base = OTHER; note = 2'-O-methyl modified nucleotide
  modified_base 6: mod_base = OTHER; note = 2'-O-methyl modified nucleotide
  modified_base 7: mod_base = OTHER; note = 2'-O-methyl modified nucleotide
  modified_base 8: mod_base = OTHER; note = 2'-O-methyl modified nucleotide
  modified_base 9: mod_base = OTHER; note = 2'-fluoro modified nucleotide
  modified_base 10: mod_base = OTHER; note = 2'-O-methyl modified nucleotide
  modified_base 11: mod_base = OTHER; note = 2'-fluoro modified nucleotide
  modified_base 12: mod_base = OTHER; note = 2'-O-methyl modified nucleotide
  modified_base 13: mod_base = OTHER; note = 2'-fluoro modified nucleotide
  modified_base 14: mod_base = OTHER; note = 2'-O-methyl modified nucleotide
  modified_base 15: mod_base = OTHER; note = 2'-O-methyl modified nucleotide
  modified_base 16: mod_base = OTHER; note = 2'-O-methyl modified nucleotide
  modified_base 17: mod_base = OTHER; note = 2'-O-methyl modified nucleotide
  modified_base 18: mod_base = OTHER; note = 2'-O-methyl modified nucleotide
  modified_base 19: mod_base = OTHER; note = 2'-O-methyl modified nucleotide
  modified_base 20: mod_base = OTHER; note = 2'-O-methyl modified nucleotide with thiophosphate linkage
  modified_base 21: mod_base = OTHER; note = 2'-O-methyl modified nucleotide
tttgccaagcttggtcatcta

SEQ ID NO: 748 - RNA, 21 nt, synthetic construct
  source 1..21: mol_type = other RNA
  modified_base 1: mod_base = OTHER; note = 2'-O-methyl modified nucleotide with thiophosphate linkage
  modified_base 2: mod_base = OTHER; note = 2'-O-methyl modified nucleotide with thiophosphate linkage
  modified_base 3: mod_base = OTHER; note = 2'-O-methyl modified nucleotide
  modified_base 4: mod_base = OTHER; note = 2'-O-methyl modified nucleotide
  modified_base 5: mod_base = OTHER; note = 2'-O-methyl modified nucleotide
  modified_base 6: mod_base = OTHER; note = 2'-O-methyl modified nucleotide
  modified_base 7: mod_base = OTHER; note = 2'-O-methyl modified nucleotide
  modified_base 8: mod_base = OTHER; note = 2'-O-methyl modified nucleotide
  modified_base 9: mod_base = OTHER; note = 2'-fluoro modified nucleotide
  modified_base 10: mod_base = OTHER; note = 2'-O-methyl modified nucleotide
  modified_base 11: mod_base = OTHER; note = 2'-fluoro modified nucleotide
  modified_base 12: mod_base = OTHER; note = 2'-O-methyl modified nucleotide
  modified_base 13: mod_base = OTHER; note = 2'-fluoro modified nucleotide
  modified_base 14: mod_base = OTHER; note = 2'-O-methyl modified nucleotide
  modified_base 15: mod_base = OTHER; note = 2'-O-methyl modified nucleotide
  modified_base 16: mod_base = OTHER; note = 2'-O-methyl modified nucleotide
  modified_base 17: mod_base = OTHER; note = 2'-O-methyl modified nucleotide
  modified_base 18: mod_base = OTHER; note = 2'-O-methyl modified nucleotide
  modified_base 19: mod_base = OTHER; note = 2'-O-methyl modified nucleotide
  modified_base 20: mod_base = OTHER; note = 2'-O-methyl modified nucleotide with thiophosphate linkage
  modified_base 21: mod_base = OTHER; note = 2'-O-methyl modified nucleotide
cttgccaagcttggtcatcta

SEQ ID NO: 749 - RNA, 21 nt, synthetic construct
  source 1..21: mol_type = other RNA
  modified_base 1: mod_base = OTHER; note = 2'-O-methyl modified nucleotide with thiophosphate linkage
  modified_base 2: mod_base = OTHER; note = 2'-O-methyl modified nucleotide with thiophosphate linkage
  modified_base 3: mod_base = OTHER; note = 2'-O-methyl modified nucleotide
  modified_base 4: mod_base = OTHER; note = 2'-O-methyl modified nucleotide
  modified_base 5: mod_base = OTHER; note = 2'-O-methyl modified nucleotide
  modified_base 6: mod_base = OTHER; note = 2'-O-methyl modified nucleotide
  modified_base 7: mod_base = OTHER; note = 2'-O-methyl modified nucleotide
  modified_base 8: mod_base = OTHER; note = 2'-O-methyl modified nucleotide
  modified_base 9: mod_base = OTHER; note = 2'-fluoro modified nucleotide
  modified_base 10: mod_base = OTHER; note = 2'-O-methyl modified nucleotide
  modified_base 11: mod_base = OTHER; note = 2'-fluoro modified nucleotide
  modified_base 12: mod_base = OTHER; note = 2'-O-methyl modified nucleotide
  modified_base 13: mod_base = OTHER; note = 2'-fluoro modified nucleotide
  modified_base 14: mod_base = OTHER; note = 2'-O-methyl modified nucleotide
  modified_base 15: mod_base = OTHER; note = 2'-O-methyl modified nucleotide
  modified_base 16: mod_base = OTHER; note = 2'-O-methyl modified nucleotide
  modified_base 17: mod_base = OTHER; note = 2'-O-methyl modified nucleotide
  modified_base 18: mod_base = OTHER; note = 2'-O-methyl modified nucleotide
  modified_base 19: mod_base = OTHER; note = 2'-O-methyl modified nucleotide
  modified_base 20: mod_base = OTHER; note = 2'-O-methyl modified nucleotide with thiophosphate linkage
  modified_base 21: mod_base = OTHER; note = 2'-O-methyl modified nucleotide
attgccaagcttggtcatcta

SEQ ID NO: 750 - RNA, 22 nt, synthetic construct
  source 1..22: mol_type = other RNA
  modified_base 1: mod_base = OTHER; note = 2'-O-methyl modified nucleotide with thiophosphate linkage
  modified_base 2: mod_base = OTHER; note = 2'-O-methyl modified nucleotide with thiophosphate linkage
  modified_base 3: mod_base = OTHER; note = 2'-O-methyl modified nucleotide
  modified_base 4: mod_base = OTHER; note = 2'-O-methyl modified nucleotide
  modified_base 5: mod_base = OTHER; note = 2'-O-methyl modified nucleotide
  modified_base 6: mod_base = OTHER; note = 2'-O-methyl modified nucleotide
  modified_base 7: mod_base = OTHER; note = 2'-O-methyl modified nucleotide
  modified_base 8: mod_base = OTHER; note = 2'-O-methyl modified nucleotide
  modified_base 9: mod_base = OTHER; note = 2'-O-methyl modified nucleotide
  modified_base 10: mod_base = OTHER; note = 2'-fluoro modified nucleotide
  modified_base 11: mod_base = OTHER; note = 2'-O-methyl modified nucleotide
  modified_base 12: mod_base = OTHER; note = 2'-fluoro modified nucleotide
  modified_base 13: mod_base = OTHER; note = 2'-O-methyl modified nucleotide
  modified_base 14: mod_base = OTHER; note = 2'-fluoro modified nucleotide
  modified_base 15: mod_base = OTHER; note = 2'-O-methyl modified nucleotide
  modified_base 16: mod_base = OTHER; note = 2'-O-methyl modified nucleotide
  modified_base 17: mod_base = OTHER; note = 2'-O-methyl modified nucleotide
  modified_base 18: mod_base = OTHER; note = 2'-O-methyl modified nucleotide
  modified_base 19: mod_base = OTHER; note = 2'-O-methyl modified nucleotide
  modified_base 20: mod_base = OTHER; note = 2'-O-methyl modified nucleotide
  modified_base 21: mod_base = OTHER; note = 2'-O-methyl modified nucleotide with thiophosphate linkage
  modified_base 22: mod_base = OTHER; note = 2'-O-methyl modified nucleotide
acttgccaagcttggtcatcta

SEQ ID NO: 751 - RNA, 23 nt, synthetic construct
  source 1..23: mol_type = other RNA
  modified_base 1: mod_base = OTHER; note = 2'-O-methyl modified nucleotide with thiophosphate linkage
  modified_base 2: mod_base = OTHER; note = 2'-O-methyl modified nucleotide with thiophosphate linkage
  modified_base 3: mod_base = OTHER; note = 2'-O-methyl modified nucleotide
  modified_base 4: mod_base = OTHER; note = 2'-O-methyl modified nucleotide
  modified_base 5: mod_base = OTHER; note = 2'-O-methyl modified nucleotide
  modified_base 6: mod_base = OTHER; note = 2'-O-methyl modified nucleotide
  modified_base 7: mod_base = OTHER; note = 2'-O-methyl modified nucleotide
  modified_base 8: mod_base = OTHER; note = 2'-O-methyl modified nucleotide
  modified_base 9: mod_base = OTHER; note = 2'-O-methyl modified nucleotide
  modified_base 10: mod_base = OTHER; note = 2'-O-methyl modified nucleotide
  modified_base 11: mod_base = OTHER; note = 2'-fluoro modified nucleotide
  modified_base 12: mod_base = OTHER; note = 2'-O-methyl modified nucleotide
  modified_base 13: mod_base = OTHER; note = 2'-fluoro modified nucleotide
  modified_base 14: mod_base = OTHER; note = 2'-O-methyl modified nucleotide
  modified_base 15: mod_base = OTHER; note = 2'-fluoro modified nucleotide
  modified_base 16: mod_base = OTHER; note = 2'-O-methyl modified nucleotide
  modified_base 17: mod_base = OTHER; note = 2'-O-methyl modified nucleotide
  modified_base 18: mod_base = OTHER; note = 2'-O-methyl modified nucleotide
  modified_base 19: mod_base = OTHER; note = 2'-O-methyl modified nucleotide
  modified_base 20: mod_base = OTHER; note = 2'-O-methyl modified nucleotide
  modified_base 21: mod_base = OTHER; note = 2'-O-methyl modified nucleotide
  modified_base 22: mod_base = OTHER; note = 2'-O-methyl modified nucleotide with thiophosphate linkage
  modified_base 23: mod_base = OTHER; note = 2'-O-methyl modified nucleotide
aacttgccaagcttggtcatcta

SEQ ID NO: 752 - RNA, 24 nt, synthetic construct
  source 1..24: mol_type = other RNA
  modified_base 1: mod_base = OTHER; note = 2'-O-methyl modified nucleotide with thiophosphate linkage
  modified_base 2: mod_base = OTHER; note = 2'-O-methyl modified nucleotide with thiophosphate linkage
  modified_base 3: mod_base = OTHER; note = 2'-O-methyl modified nucleotide
  modified_base 4: mod_base = OTHER; note = 2'-O-methyl modified nucleotide
  modified_base 5: mod_base = OTHER; note = 2'-O-methyl modified nucleotide
  modified_base 6: mod_base = OTHER; note = 2'-O-methyl modified nucleotide
  modified_base 7: mod_base = OTHER; note = 2'-O-methyl modified nucleotide
  modified_base 8: mod_base = OTHER; note = 2'-O-methyl modified nucleotide
  modified_base 9: mod_base = OTHER; note = 2'-O-methyl modified nucleotide
  modified_base 10: mod_base = OTHER; note = 2'-O-methyl modified nucleotide
  modified_base 11: mod_base = OTHER; note = 2'-O-methyl modified nucleotide
  modified_base 12: mod_base = OTHER; note = 2'-fluoro modified nucleotide
  modified_base 13: mod_base = OTHER; note = 2'-O-methyl modified nucleotide
  modified_base 14: mod_base = OTHER; note = 2'-fluoro modified nucleotide
  modified_base 15: mod_base = OTHER; note = 2'-O-methyl modified nucleotide
  modified_base 16: mod_base = OTHER; note = 2'-fluoro modified nucleotide
  modified_base 17: mod_base = OTHER; note = 2'-O-methyl modified nucleotide
  modified_base 18: mod_base = OTHER; note = 2'-O-methyl modified nucleotide
  modified_base 19: mod_base = OTHER; note = 2'-O-methyl modified nucleotide
  modified_base 20: mod_base = OTHER; note = 2'-O-methyl modified nucleotide
  modified_base 21: mod_base = OTHER; note = 2'-O-methyl modified nucleotide
  modified_base 22: mod_base = OTHER; note = 2'-O-methyl modified nucleotide
  modified_base 23: mod_base = OTHER; note = 2'-O-methyl modified nucleotide with thiophosphate linkage
  modified_base 24: mod_base = OTHER; note = 2'-O-methyl modified nucleotide
gaacttgccaagcttggtcatcta

SEQ ID NO: 753 - RNA, 25 nt, synthetic construct
  source 1..25: mol_type = other RNA
  modified_base 1: mod_base = OTHER; note = 2'-O-methyl modified nucleotide with thiophosphate linkage
  modified_base 2: mod_base = OTHER; note = 2'-O-methyl modified nucleotide with thiophosphate linkage
  modified_base 3: mod_base = OTHER; note = 2'-O-methyl modified nucleotide
  modified_base 4: mod_base = OTHER; note = 2'-O-methyl modified nucleotide
  modified_base 5: mod_base = OTHER; note = 2'-O-methyl modified nucleotide
  modified_base 6: mod_base = OTHER; note = 2'-O-methyl modified nucleotide
  modified_base 7: mod_base = OTHER; note = 2'-O-methyl modified nucleotide
  modified_base 8: mod_base = OTHER; note = 2'-O-methyl modified nucleotide
  modified_base 9: mod_base = OTHER; note = 2'-O-methyl modified nucleotide
  modified_base 10: mod_base = OTHER; note = 2'-O-methyl modified nucleotide
  modified_base 11: mod_base = OTHER; note = 2'-O-methyl modified nucleotide
  modified_base 12: mod_base = OTHER; note = 2'-O-methyl modified nucleotide
  modified_base 13: mod_base = OTHER; note = 2'-fluoro modified nucleotide
  modified_base 14: mod_base = OTHER; note = 2'-O-methyl modified nucleotide
  modified_base 15: mod_base = OTHER; note = 2'-fluoro modified nucleotide
  modified_base 16: mod_base = OTHER; note = 2'-O-methyl modified nucleotide
  modified_base 17: mod_base = OTHER; note = 2'-fluoro modified nucleotide
  modified_base 18: mod_base = OTHER; note = 2'-O-methyl modified nucleotide
  modified_base 19: mod_base = OTHER; note = 2'-O-methyl modified nucleotide
  modified_base 20: mod_base = OTHER; note = 2'-O-methyl modified nucleotide
  modified_base 21: mod_base = OTHER; note = 2'-O-methyl modified nucleotide
  modified_base 22: mod_base = OTHER; note = 2'-O-methyl modified nucleotide
  modified_base 23: mod_base = OTHER; note = 2'-O-methyl modified nucleotide
  modified_base 24: mod_base = OTHER; note = 2'-O-methyl modified nucleotide with thiophosphate linkage
  modified_base 25: mod_base = OTHER; note = 2'-O-methyl modified nucleotide
agaacttgccaagcttggtcatcta

SEQ ID NO: 754 - RNA, 26 nt, synthetic construct
  source 1..26: mol_type = other RNA
  modified_base 1: mod_base = OTHER; note = 2'-O-methyl modified nucleotide with thiophosphate linkage
  modified_base 2: mod_base = OTHER; note = 2'-O-methyl modified nucleotide with thiophosphate linkage
  modified_base 3: mod_base = OTHER; note = 2'-O-methyl modified nucleotide
  modified_base 4: mod_base = OTHER; note = 2'-O-methyl modified nucleotide
  modified_base 5: mod_base = OTHER; note = 2'-O-methyl modified nucleotide
  modified_base 6: mod_base = OTHER; note = 2'-O-methyl modified nucleotide
  modified_base 7: mod_base = OTHER; note = 2'-O-methyl modified nucleotide
  modified_base 8: mod_base = OTHER; note = 2'-O-methyl modified nucleotide
  modified_base 9: mod_base = OTHER; note = 2'-O-methyl modified nucleotide
  modified_base 10: mod_base = OTHER; note = 2'-O-methyl modified nucleotide
  modified_base 11: mod_base = OTHER; note = 2'-O-methyl modified nucleotide
  modified_base 12: mod_base = OTHER; note = 2'-O-methyl modified nucleotide
  modified_base 13: mod_base = OTHER; note = 2'-O-methyl modified nucleotide
  modified_base 14: mod_base = OTHER; note = 2'-fluoro modified nucleotide
  modified_base 15: mod_base = OTHER; note = 2'-O-methyl modified nucleotide
  modified_base 16: mod_base = OTHER; note = 2'-fluoro modified nucleotide
  modified_base 17: mod_base = OTHER; note = 2'-O-methyl modified nucleotide
  modified_base 18: mod_base = OTHER; note = 2'-fluoro modified nucleotide
  modified_base 19: mod_base = OTHER; note = 2'-O-methyl modified nucleotide
  modified_base 20: mod_base = OTHER; note = 2'-O-methyl modified nucleotide
  modified_base 21: mod_base = OTHER; note = 2'-O-methyl modified nucleotide
  modified_base 22: mod_base = OTHER; note = 2'-O-methyl modified nucleotide
  modified_base 23: mod_base = OTHER; note = 2'-O-methyl modified nucleotide
  modified_base 24: mod_base = OTHER; note = 2'-O-methyl modified nucleotide
  modified_base 25: mod_base = OTHER; note = 2'-O-methyl modified nucleotide with thiophosphate linkage
  modified_base 26: mod_base = OTHER; note = 2'-O-methyl modified nucleotide
aagaacttgccaagcttggtcatcta

SEQ ID NO: 755 - RNA, 32 nt, synthetic construct; identical to SEQ ID NO: 568
  source 1..32: mol_type = other RNA
  modified_base 1: mod_base = OTHER; note = 2'-O-methyl modified nucleotide with thiophosphate linkage
  modified_base 2: mod_base = OTHER; note = 2'-O-methyl modified nucleotide with thiophosphate linkage
  modified_base 3: mod_base = OTHER; note = 2'-O-methyl modified nucleotide
  modified_base 4: mod_base = OTHER; note = 2'-O-methyl modified nucleotide
  modified_base 5: mod_base = OTHER; note = 2'-O-methyl modified nucleotide
  modified_base 6: mod_base = OTHER; note = 2'-O-methyl modified nucleotide
  modified_base 7: mod_base = OTHER; note = 2'-O-methyl modified nucleotide
  modified_base 8: mod_base = OTHER; note = 2'-O-methyl modified nucleotide
  modified_base 9: mod_base = OTHER; note = 2'-O-methyl modified nucleotide
  modified_base 10: mod_base = OTHER; note = 2'-O-methyl modified nucleotide
  modified_base 11: mod_base = OTHER; note = 2'-O-methyl modified nucleotide
  modified_base 12: mod_base = OTHER; note = 2'-O-methyl modified nucleotide
  modified_base 13: mod_base = OTHER; note = 2'-O-methyl modified nucleotide
  modified_base 14: mod_base = OTHER; note = 2'-O-methyl modified nucleotide
  modified_base 15: mod_base = OTHER; note = 2'-O-methyl modified nucleotide
  modified_base 16: mod_base = OTHER; note = 2'-O-methyl modified nucleotide
  modified_base 17: mod_base = OTHER; note = 2'-O-methyl modified nucleotide
  modified_base 18: mod_base = OTHER; note = 2'-O-methyl modified nucleotide
  modified_base 19: mod_base = OTHER; note = 2'-O-methyl modified nucleotide
  modified_base 20: mod_base = OTHER; note = 2'-fluoro modified nucleotide
  modified_base 21: mod_base = OTHER; note = 2'-O-methyl modified nucleotide
  modified_base 22: mod_base = OTHER; note = 2'-fluoro modified nucleotide
  modified_base 23: mod_base = OTHER; note = 2'-O-methyl modified nucleotide
  modified_base 24: mod_base = OTHER; note = 2'-fluoro modified nucleotide
  modified_base 25: mod_base = OTHER; note = 2'-O-methyl modified nucleotide
  modified_base 26: mod_base = OTHER; note = 2'-O-methyl modified nucleotide
  modified_base 27: mod_base = OTHER; note = 2'-O-methyl modified nucleotide
  modified_base 28: mod_base = OTHER; note = 2'-O-methyl modified nucleotide
  modified_base 29: mod_base = OTHER; note = 2'-O-methyl modified nucleotide
  modified_base 30: mod_base = OTHER; note = 2'-O-methyl modified nucleotide
  modified_base 31: mod_base = OTHER; note = 2'-O-methyl modified nucleotide with thiophosphate linkage
  modified_base 32: mod_base = OTHER; note = 2'-O-methyl modified nucleotide

SEQ ID NO: 756 - RNA, 21 nt, synthetic construct
  source 1..21: mol_type = other RNA
  modified_base 1: mod_base = OTHER; note = 2'-O-methyl modified nucleotide with thiophosphate linkage
  modified_base 2: mod_base = OTHER; note = 2'-O-methyl modified nucleotide with thiophosphate linkage
  modified_base 3: mod_base = OTHER; note = 2'-O-methyl modified nucleotide
  modified_base 4: mod_base = OTHER; note = 2'-O-methyl modified nucleotide
  modified_base 5: mod_base = OTHER; note = 2'-O-methyl modified nucleotide
  modified_base 6: mod_base = OTHER; note = 2'-O-methyl modified nucleotide
  modified_base 7: mod_base = OTHER; note = 2'-O-methyl modified nucleotide
  modified_base 8: mod_base = OTHER; note = 2'-O-methyl modified nucleotide
  modified_base 9: mod_base = OTHER; note = 2'-fluoro modified nucleotide
  modified_base 10: mod_base = OTHER; note = 2'-O-methyl modified nucleotide
  modified_base 11: mod_base = OTHER; note = 2'-fluoro modified nucleotide
  modified_base 12: mod_base = OTHER; note = 2'-O-methyl modified nucleotide
  modified_base 13: mod_base = OTHER; note = 2'-fluoro modified nucleotide
  modified_base 14: mod_base = OTHER; note = 2'-O-methyl modified nucleotide
  modified_base 15: mod_base = OTHER; note = 2'-O-methyl modified nucleotide
  modified_base 16: mod_base = OTHER; note = 2'-O-methyl modified nucleotide
  modified_base 17: mod_base = OTHER; note = 2'-O-methyl modified nucleotide
  modified_base 18: mod_base = OTHER; note = 2'-O-methyl modified nucleotide
  modified_base 19: mod_base = OTHER; note = 2'-O-methyl modified nucleotide
  modified_base 20: mod_base = OTHER; note = 2'-O-methyl modified nucleotide with thiophosphate linkage
  modified_base 21: mod_base = OTHER; note = 2'-O-methyl modified nucleotide
gttgccaagcttggtcatcta

SEQ ID NO: 757 - RNA, 21 nt, synthetic construct
  source 1..21: mol_type = other RNA
  modified_base 1: mod_base = OTHER; note = 2'-O-methyl modified nucleotide with thiophosphate linkage
  modified_base 2: mod_base = OTHER; note = 2'-O-methyl modified nucleotide with thiophosphate linkage
  modified_base 3: mod_base = OTHER; note = 2'-O-methyl modified nucleotide
  modified_base 4: mod_base = OTHER; note = 2'-O-methyl modified nucleotide
  modified_base 5: mod_base = OTHER; note = 2'-O-methyl modified nucleotide
  modified_base 6: mod_base = OTHER; note = 2'-O-methyl modified nucleotide
  modified_base 7: mod_base = OTHER; note = 2'-O-methyl modified nucleotide
  modified_base 8: mod_base = OTHER; note = 2'-O-methyl modified nucleotide
  modified_base 9: mod_base = OTHER; note = 2'-fluoro modified nucleotide
  modified_base 10: mod_base = OTHER; note = 2'-O-methyl modified nucleotide
  modified_base 11: mod_base = OTHER; note = 2'-fluoro modified nucleotide
  modified_base 12: mod_base = OTHER; note = 2'-O-methyl modified nucleotide
  modified_base 13: mod_base = OTHER; note = 2'-fluoro modified nucleotide
  modified_base 14: mod_base = OTHER; note = 2'-O-methyl modified nucleotide
  modified_base 15: mod_base = OTHER; note = 2'-O-methyl modified nucleotide
  modified_base 16: mod_base = OTHER; note = 2'-O-methyl modified nucleotide
  modified_base 17: mod_base = OTHER; note = 2'-O-methyl modified nucleotide
  modified_base 18: mod_base = OTHER; note = 2'-O-methyl modified nucleotide
  modified_base 19: mod_base = OTHER; note = 2'-O-methyl modified nucleotide
  modified_base 20: mod_base = OTHER; note = 2'-O-methyl modified nucleotide with thiophosphate linkage
  modified_base 21: mod_base = OTHER; note = 2'-O-methyl modified nucleotide
gttgccaagcttggtcatcta

SEQ ID NO: 758 - RNA, 21 nt, synthetic construct
  source 1..21: mol_type = other RNA
  modified_base 1: mod_base = OTHER; note = 2'-O-methyl modified nucleotide with thiophosphate linkage
  modified_base 2: mod_base = OTHER; note = 2'-O-methyl modified nucleotide with thiophosphate linkage
  modified_base 3: mod_base = OTHER; note = 2'-O-methyl modified nucleotide
  modified_base 4: mod_base = OTHER; note = 2'-O-methyl modified nucleotide
  modified_base 5: mod_base = OTHER; note = 2'-O-methyl modified nucleotide
  modified_base 6: mod_base = OTHER; note = 2'-O-methyl modified nucleotide
  modified_base 7: mod_base = OTHER; note = 2'-O-methyl modified nucleotide
  modified_base 8: mod_base = OTHER; note = 2'-O-methyl modified nucleotide
  modified_base 9: mod_base = OTHER; note = 2'-fluoro modified nucleotide
  modified_base 10: mod_base = OTHER; note = 2'-O-methyl modified nucleotide
  modified_base 11: mod_base = OTHER; note = 2'-fluoro modified nucleotide
  modified_base 12: mod_base = OTHER; note = 2'-O-methyl modified nucleotide
  modified_base 13: mod_base = OTHER; note = 2'-fluoro modified nucleotide
  modified_base 14: mod_base = OTHER; note = 2'-O-methyl modified nucleotide
  modified_base 15: mod_base = OTHER; note = 2'-O-methyl modified nucleotide
  modified_base 16: mod_base = OTHER; note = 2'-O-methyl modified nucleotide
  modified_base 17: mod_base = OTHER; note = 2'-O-methyl modified nucleotide
  modified_base 18: mod_base = OTHER; note = 2'-O-methyl modified nucleotide
  modified_base 19: mod_base = OTHER; note = 2'-O-methyl modified nucleotide
  modified_base 20: mod_base = OTHER; note = 2'-O-methyl modified nucleotide with thiophosphate linkage
  modified_base 21: mod_base = OTHER; note = 2'-O-methyl modified nucleotide
gttgccaagcttggtcatcta

SEQ ID NO: 759 - RNA, 21 nt, synthetic construct
  source 1..21: mol_type = other RNA
  modified_base 1: mod_base = OTHER; note = 2'-O-methyl modified nucleotide with thiophosphate linkage
  modified_base 2: mod_base = OTHER; note = 2'-O-methyl modified nucleotide with thiophosphate linkage
  modified_base 3: mod_base = OTHER; note = 2'-O-methyl modified nucleotide
  modified_base 4: mod_base = OTHER; note = 2'-O-methyl modified nucleotide
  modified_base 5: mod_base = OTHER; note = 2'-O-methyl modified nucleotide
  modified_base 6: mod_base = OTHER; note = 2'-O-methyl modified nucleotide
  modified_base 7: mod_base = OTHER; note = 2'-O-methyl modified nucleotide
  modified_base 8: mod_base = OTHER; note = 2'-O-methyl modified nucleotide
  modified_base 9: mod_base = OTHER; note = 2'-fluoro modified nucleotide
  modified_base 10: mod_base = OTHER; note = 2'-O-methyl modified nucleotide
  modified_base 11: mod_base = OTHER; note = 2'-fluoro modified nucleotide
  modified_base 12: mod_base = OTHER; note = 2'-O-methyl modified nucleotide
  modified_base 13: mod_base = OTHER; note = 2'-fluoro modified nucleotide
  modified_base 14: mod_base = OTHER; note = 2'-O-methyl modified nucleotide
  modified_base 15: mod_base = OTHER; note = 2'-O-methyl modified nucleotide
  modified_base 16: mod_base = OTHER; note = 2'-O-methyl modified nucleotide
  modified_base 17: mod_base = OTHER; note = 2'-O-methyl modified nucleotide
  modified_base 18: mod_base = OTHER; note = 2'-O-methyl modified nucleotide
  modified_base 19: mod_base = OTHER; note = 2'-O-methyl modified nucleotide
  modified_base 20: mod_base = OTHER; note = 2'-O-methyl modified nucleotide with thiophosphate linkage
  modified_base 21: mod_base = OTHER; note = 2'-O-methyl modified nucleotide
gttgccaagcttggtcatcta

SEQ ID NO: 760 - RNA, 21 nt, synthetic construct
  source 1..21: mol_type = other RNA
  modified_base 1: mod_base = OTHER; note = 2'-O-methyl modified nucleotide with thiophosphate linkage
  modified_base 2: mod_base = OTHER; note = 2'-O-methyl modified nucleotide with thiophosphate linkage
  modified_base 3: mod_base = OTHER; note = 2'-O-methyl modified nucleotide
  modified_base 4: mod_base = OTHER; note = 2'-O-methyl modified nucleotide
  modified_base 5: mod_base = OTHER; note = 2'-O-methyl modified nucleotide
  modified_base 6: mod_base = OTHER; note = 2'-O-methyl modified nucleotide
  modified_base 7: mod_base = OTHER; note = 2'-O-methyl modified nucleotide
  modified_base 8: mod_base = OTHER; note = 2'-O-methyl modified nucleotide
  modified_base 9: mod_base = OTHER; note = 2'-fluoro modified nucleotide
  modified_base 10: mod_base = OTHER; note = 2'-fluoro modified nucleotide
  modified_base 11: mod_base = OTHER; note = 2'-fluoro modified nucleotide
  modified_base 12: mod_base = OTHER; note = 2'-O-methyl modified nucleotide
  modified_base 13: mod_base = OTHER; note = 2'-O-methyl modified nucleotide
  modified_base 14: mod_base = OTHER; note = 2'-O-methyl modified nucleotide
  modified_base 15: mod_base = OTHER; note = 2'-O-methyl modified nucleotide
  modified_base 16: mod_base = OTHER; note = 2'-O-methyl modified nucleotide
  modified_base 17: mod_base = OTHER; note = 2'-O-methyl modified nucleotide
  modified_base 18: mod_base = OTHER; note = 2'-O-methyl modified nucleotide
  modified_base 19: mod_base = OTHER; note = 2'-O-methyl modified nucleotide
  modified_base 20: mod_base = OTHER; note = 2'-O-methyl modified nucleotide with thiophosphate linkage
  modified_base 21: mod_base = OTHER; note = 2'-O-methyl modified nucleotide
gttgccaagcttggtcatcta

SEQ ID NO: 761 - RNA, 21 nt, synthetic construct
  source 1..21: mol_type = other RNA
  modified_base 1: mod_base = OTHER; note = 2'-O-methyl modified nucleotide with thiophosphate linkage
  modified_base 2: mod_base = OTHER; note = 2'-O-methyl modified nucleotide with thiophosphate linkage
  modified_base 3: mod_base = OTHER; note = 2'-O-methyl modified nucleotide
  modified_base 4: mod_base = OTHER; note = 2'-O-methyl modified nucleotide
  modified_base 5: mod_base = OTHER; note = 2'-O-methyl modified nucleotide
  modified_base 6: mod_base = OTHER; note = 2'-O-methyl modified nucleotide
  modified_base 7: mod_base = OTHER; note = 2'-O-methyl modified nucleotide
  modified_base 8: mod_base = OTHER; note = 2'-O-methyl modified nucleotide
  modified_base 9: mod_base = OTHER; note = 2'-fluoro modified nucleotide
  modified_base 10: mod_base = OTHER; note = 2'-O-methyl modified nucleotide
  modified_base 11: mod_base = OTHER; note = 2'-fluoro modified nucleotide
  modified_base 12: mod_base = OTHER; note = 2'-O-methyl modified nucleotide
  modified_base 13: mod_base = OTHER; note = 2'-fluoro modified nucleotide
  modified_base 14: mod_base = OTHER; note = 2'-O-methyl modified nucleotide
  modified_base 15: mod_base = OTHER; note = 2'-O-methyl modified nucleotide
  modified_base 16: mod_base = OTHER; note = 2'-O-methyl modified nucleotide
  modified_base 17: mod_base = OTHER; note = 2'-O-methyl modified nucleotide
  modified_base 18: mod_base = OTHER; note = 2'-O-methyl modified nucleotide
  modified_base 19: mod_base = OTHER; note = 2'-O-methyl modified nucleotide
  modified_base 20: mod_base = OTHER; note = 2'-O-methyl modified nucleotide with thiophosphate linkage
  modified_base 21: mod_base = OTHER; note = 2'-O-methyl modified nucleotide
gttgccaagcttggttatcta

SEQ ID NO: 762 - RNA, 21 nt, synthetic construct
  source 1..21: mol_type = other RNA
  modified_base 1: mod_base = OTHER; note = 2'-O-methyl modified nucleotide with thiophosphate linkage
  modified_base 2: mod_base = OTHER; note = 2'-O-methyl modified nucleotide with thiophosphate linkage
  modified_base 3: mod_base = OTHER; note = 2'-O-methyl modified nucleotide
  modified_base 4: mod_base = OTHER; note = 2'-O-methyl modified nucleotide
  modified_base 5: mod_base = OTHER; note = 2'-O-methyl modified nucleotide
  modified_base 6: mod_base = OTHER; note = 2'-O-methyl modified nucleotide
  modified_base 7: mod_base = OTHER; note = 2'-O-methyl modified nucleotide
  modified_base 8: mod_base = OTHER; note = 2'-O-methyl modified nucleotide
  modified_base 9: mod_base = OTHER; note = 2'-fluoro modified nucleotide
  modified_base 10: mod_base = OTHER; note = 2'-O-methyl modified nucleotide
  modified_base 11: mod_base = OTHER; note = 2'-fluoro modified nucleotide
  modified_base 12: mod_base = OTHER; note = 2'-O-methyl modified nucleotide
  modified_base 13: mod_base = OTHER; note = 2'-fluoro modified nucleotide
  modified_base 14: mod_base = OTHER; note = 2'-O-methyl modified nucleotide
  modified_base 15: mod_base = OTHER; note = 2'-O-methyl modified nucleotide
  modified_base 16: mod_base = OTHER; note = 2'-O-methyl modified nucleotide
  modified_base 17: mod_base = OTHER; note = 2'-O-methyl modified nucleotide
  modified_base 18: mod_base = OTHER; note = 2'-O-methyl modified nucleotide
  modified_base 19: mod_base = OTHER; note = 2'-O-methyl modified nucleotide
  modified_base 20: mod_base = OTHER; note = 2'-O-methyl modified nucleotide with thiophosphate linkage
  modified_base 21: mod_base = OTHER; note = 2'-O-methyl modified nucleotide
gttgccaagcttggtcatcca

SEQ ID NO: 763 - RNA, 21 nt, synthetic construct
  source 1..21: mol_type = other RNA
  modified_base 1: mod_base = OTHER; note = 2'-O-methyl modified nucleotide with thiophosphate linkage
  modified_base 2: mod_base = OTHER; note = 2'-O-methyl modified nucleotide with thiophosphate linkage
  modified_base 3: mod_base = OTHER; note = 2'-O-methyl modified nucleotide
  modified_base 4: mod_base = OTHER; note = 2'-O-methyl modified nucleotide
  modified_base 5: mod_base = OTHER; note = 2'-O-methyl modified nucleotide
  modified_base 6: mod_base = OTHER; note = 2'-O-methyl modified nucleotide
  modified_base 7: mod_base = OTHER; note = 2'-O-methyl modified nucleotide
  modified_base 8: mod_base = OTHER; note = 2'-O-methyl modified nucleotide
  modified_base 9: mod_base = OTHER; note = 2'-fluoro modified nucleotide
  modified_base 10: mod_base = OTHER; note = 2'-O-methyl modified nucleotide
  modified_base 11: mod_base = OTHER; note = 2'-fluoro modified nucleotide
  modified_base 12: mod_base = OTHER; note = 2'-O-methyl modified nucleotide
  modified_base 13: mod_base = OTHER; note = 2'-fluoro modified nucleotide
  modified_base 14: mod_base = OTHER; note = 2'-O-methyl modified nucleotide
  modified_base 15: mod_base = OTHER; note = 2'-O-methyl modified nucleotide
  modified_base 16: mod_base = OTHER; note = 2'-O-methyl modified nucleotide
  modified_base 17: mod_base = OTHER; note = 2'-O-methyl modified nucleotide
  modified_base 18: mod_base = OTHER; note = 2'-O-methyl modified nucleotide
  modified_base 19: mod_base = OTHER; note = 2'-O-methyl modified nucleotide with thiophosphate linkage
  modified_base 20: mod_base = OTHER; note = 2'-O-methyl modified nucleotide with thiophosphate linkage
  modified_base 21: mod_base = OTHER; note = 2'-O-methyl modified nucleotide
gttgccaagcttggtcatcta

SEQ ID NO: 764 - RNA, 21 nt, synthetic construct
  source 1..21: mol_type = other RNA
  modified_base 1: mod_base = OTHER; note = 2'-O-methyl modified nucleotide with thiophosphate linkage
  modified_base 2: mod_base = OTHER; note = 2'-O-methyl modified nucleotide with thiophosphate linkage
  modified_base 3: mod_base = OTHER; note = 2'-O-methyl modified nucleotide
  modified_base 4: mod_base = OTHER; note = 2'-O-methyl modified nucleotide
  modified_base 5: mod_base = OTHER; note = 2'-O-methyl modified nucleotide
  modified_base 6: mod_base = OTHER; note = 2'-O-methyl modified nucleotide
  modified_base 7: mod_base = OTHER; note = 2'-O-methyl modified nucleotide
  modified_base 8: mod_base = OTHER; note = 2'-O-methyl modified nucleotide
  modified_base 9: mod_base = OTHER; note = 2'-fluoro modified nucleotide
  modified_base 10: mod_base = OTHER; note = 2'-O-methyl modified nucleotide
  modified_base 11: mod_base = OTHER; note = 2'-fluoro modified nucleotide
  modified_base 12: mod_base = OTHER; note = 2'-O-methyl modified nucleotide
  modified_base 13: mod_base = OTHER; note = 2'-fluoro modified nucleotide
  modified_base 14: mod_base = OTHER; note = 2'-O-methyl modified nucleotide
  modified_base 15: mod_base = OTHER; note = 2'-O-methyl modified nucleotide
  modified_base 16: mod_base = OTHER; note = 2'-O-methyl modified nucleotide
  modified_base 17: mod_base = OTHER; note = 2'-O-methyl modified nucleotide
  modified_base 18: mod_base = OTHER; note = 2'-O-methyl modified nucleotide
  modified_base 19: mod_base = OTHER; note = 2'-O-methyl modified nucleotide
  modified_base 20: mod_base = OTHER; note = 2'-O-methyl modified nucleotide with thiophosphate linkage
  modified_base 21: mod_base = OTHER; note = 2'-O-methyl modified nucleotide
catggacagagttatcgagga

SEQ ID NO: 765 - RNA, 21 nt, synthetic construct
  source 1..21: mol_type = other RNA
  modified_base 1: mod_base = OTHER; note = 2'-O-methyl modified nucleotide with thiophosphate linkage
  modified_base 2: mod_base = OTHER; note = 2'-O-methyl modified nucleotide with thiophosphate linkage
  modified_base 3: mod_base = OTHER; note = 2'-O-methyl modified nucleotide
  modified_base 4: mod_base = OTHER; note = 2'-O-methyl modified nucleotide
  modified_base 5: mod_base = OTHER; note = 2'-O-methyl modified nucleotide
  modified_base 6: mod_base = OTHER; note = 2'-O-methyl modified nucleotide
  modified_base 7: mod_base = OTHER; note = 2'-O-methyl modified nucleotide
  modified_base 8: mod_base = OTHER; note = 2'-O-methyl modified nucleotide
  modified_base 9: mod_base = OTHER; note = 2'-fluoro modified nucleotide
  modified_base 10: mod_base = OTHER; note = 2'-O-methyl modified nucleotide
  modified_base 11: mod_base = OTHER; note = 2'-fluoro modified nucleotide
  modified_base 12: mod_base = OTHER; note = 2'-O-methyl modified nucleotide
  modified_base 13: mod_base = OTHER; note = 2'-fluoro modified nucleotide
  modified_base 14: mod_base = OTHER; note = 2'-O-methyl modified nucleotide
  modified_base 15: mod_base = OTHER; note = 2'-O-methyl modified nucleotide
  modified_base 16: mod_base = OTHER; note = 2'-O-methyl modified nucleotide
  modified_base 17: mod_base = OTHER; note = 2'-O-methyl modified nucleotide
  modified_base 18: mod_base = OTHER; note = 2'-O-methyl modified nucleotide
  modified_base 19: mod_base = OTHER; note = 2'-O-methyl modified nucleotide
  modified_base 20: mod_base = OTHER; note = 2'-O-methyl modified nucleotide with thiophosphate linkage
  modified_base 21: mod_base = OTHER; note = 2'-O-methyl modified nucleotide
catggacagagttatcgaggt

SEQ ID NO: 766 - RNA, 21 nt, synthetic construct
  source 1..21: mol_type = other RNA
  modified_base 1: mod_base = OTHER; note = 2'-O-methyl modified nucleotide with thiophosphate linkage
  modified_base 2: mod_base = OTHER; note = 2'-O-methyl modified nucleotide with thiophosphate linkage
  modified_base 3: mod_base = OTHER; note = 2'-O-methyl modified nucleotide
  modified_base 4: mod_base = OTHER; note = 2'-O-methyl modified nucleotide
  modified_base 5: mod_base = OTHER; note = 2'-O-methyl modified nucleotide
  modified_base 6: mod_base = OTHER; note = 2'-O-methyl modified nucleotide
  modified_base 7: mod_base = OTHER; note = 2'-O-methyl modified nucleotide
  modified_base 8: mod_base = OTHER; note = 2'-O-methyl modified nucleotide
  modified_base 9: mod_base = OTHER; note = 2'-fluoro modified nucleotide
  modified_base 10: mod_base = OTHER; note = 2'-O-methyl modified nucleotide
  modified_base 11: mod_base = OTHER; note = 2'-fluoro modified nucleotide
  modified_base 12: mod_base = OTHER; note = 2'-O-methyl modified nucleotide
  modified_base 13: mod_base = OTHER; note = 2'-fluoro modified nucleotide
  modified_base 14: mod_base = OTHER; note = 2'-O-methyl modified nucleotide
  modified_base 15: mod_base = OTHER; note = 2'-O-methyl modified nucleotide
  modified_base 16: mod_base = OTHER; note = 2'-O-methyl modified nucleotide
  modified_base 17: mod_base = OTHER; note = 2'-O-methyl modified nucleotide
  modified_base 18: mod_base = OTHER; note = 2'-O-methyl modified nucleotide
  modified_base 19: mod_base = OTHER; note = 2'-O-methyl modified nucleotide
  modified_base 20: mod_base = OTHER; note = 2'-O-methyl modified nucleotide with thiophosphate linkage
  modified_base 21: mod_base = OTHER; note = 2'-O-methyl modified nucleotide
catggacagagttatcgaggc

SEQ ID NO: 767 - RNA, 21 nt, synthetic construct
  source 1..21: mol_type = other RNA
  modified_base 1: mod_base = OTHER; note = 2'-O-methyl modified nucleotide with thiophosphate linkage
  modified_base 2: mod_base = OTHER; note = 2'-O-methyl modified nucleotide with thiophosphate linkage
  modified_base 3: mod_base = OTHER; note = 2'-O-methyl modified nucleotide
  modified_base 4: mod_base = OTHER; note = 2'-O-methyl modified nucleotide
  modified_base 5: mod_base = OTHER; note = 2'-O-methyl modified nucleotide
  modified_base 6: mod_base = OTHER; note = 2'-O-methyl modified nucleotide
  modified_base 7: mod_base = OTHER; note = 2'-O-methyl modified nucleotide
  modified_base 8: mod_base = OTHER; note = 2'-O-methyl modified nucleotide
  modified_base 9: mod_base = OTHER; note = 2'-fluoro modified nucleotide
  modified_base 10: mod_base = OTHER; note = 2'-O-methyl modified nucleotide
  modified_base 11: mod_base = OTHER; note = 2'-fluoro modified nucleotide
  modified_base 12: mod_base = OTHER; note = 2'-O-methyl modified nucleotide
  modified_base 13: mod_base = OTHER; note = 2'-fluoro modified nucleotide
  modified_base 14: mod_base = OTHER; note = 2'-O-methyl modified nucleotide
  modified_base 15: mod_base = OTHER; note = 2'-O-methyl modified nucleotide
  modified_base 16: mod_base = OTHER; note = 2'-O-methyl modified nucleotide
  modified_base 17: mod_base = OTHER; note = 2'-O-methyl modified nucleotide
  modified_base 18: mod_base = OTHER; note = 2'-O-methyl modified nucleotide
  modified_base 19: mod_base = OTHER; note = 2'-O-methyl modified nucleotide
  modified_base 20: mod_base = OTHER; note = 2'-O-methyl modified nucleotide with thiophosphate linkage
  modified_base 21: mod_base = OTHER; note = 2'-O-methyl modified nucleotide
catggacagagttatcgaggg

SEQ ID NO: 768 - RNA, 17 nt, synthetic construct
  source 1..17: mol_type = other RNA
  modified_base 1: mod_base = OTHER; note = 2'-O-methyl modified nucleotide with thiophosphate linkage
  modified_base 2: mod_base = OTHER; note = 2'-O-methyl modified nucleotide with thiophosphate linkage
  modified_base 3: mod_base = OTHER; note = 2'-O-methyl modified nucleotide
  modified_base 4: mod_base = OTHER; note = 2'-O-methyl modified nucleotide
  modified_base 5: mod_base = OTHER; note = 2'-fluoro modified nucleotide
  modified_base 6: mod_base = OTHER; note = 2'-O-methyl modified nucleotide
  modified_base 7: mod_base = OTHER; note = 2'-fluoro modified nucleotide
  modified_base 8: mod_base = OTHER; note = 2'-O-methyl modified nucleotide
  modified_base 9: mod_base = OTHER; note = 2'-fluoro modified nucleotide
  modified_base 10: mod_base = OTHER; note = 2'-O-methyl modified nucleotide
  modified_base 11: mod_base = OTHER; note = 2'-O-methyl modified nucleotide
  modified_base 12: mod_base = OTHER; note = 2'-O-methyl modified nucleotide
  modified_base 13: mod_base = OTHER; note = 2'-O-methyl modified nucleotide
  modified_base 14: mod_base = OTHER; note = 2'-O-methyl modified nucleotide
  modified_base 15: mod_base = OTHER; note = 2'-O-methyl modified nucleotide
  modified_base 16: mod_base = OTHER; note = 2'-O-methyl modified nucleotide with thiophosphate linkage
  modified_base 17: mod_base = OTHER; note = 2'-O-methyl modified nucleotide
gacagagttatcgagga

SEQ ID NO: 769 - RNA, 18 nt, synthetic construct
  source 1..18: mol_type = other RNA
  modified_base 1: mod_base = OTHER; note = 2'-O-methyl modified nucleotide with thiophosphate linkage
  modified_base 2: mod_base = OTHER; note = 2'-O-methyl modified nucleotide with thiophosphate linkage
  modified_base 3: mod_base = OTHER; note = 2'-O-methyl modified nucleotide
  modified_base 4: mod_base = OTHER; note = 2'-O-methyl modified nucleotide
  modified_base 5: mod_base = OTHER; note = 2'-O-methyl modified nucleotide
  modified_base 6: mod_base = OTHER; note = 2'-fluoro modified nucleotide
  modified_base 7: mod_base = OTHER; note = 2'-O-methyl modified nucleotide
  modified_base 8: mod_base = OTHER; note = 2'-fluoro modified nucleotide
  modified_base 9: mod_base = OTHER; note = 2'-O-methyl modified nucleotide
  modified_base 10: mod_base = OTHER; note = 2'-fluoro modified nucleotide
  modified_base 11: mod_base = OTHER; note = 2'-O-methyl modified nucleotide
  modified_base 12: mod_base = OTHER; note = 2'-O-methyl modified nucleotide
  modified_base 13: mod_base = OTHER; note = 2'-O-methyl modified nucleotide
  modified_base 14: mod_base = OTHER; note = 2'-O-methyl modified nucleotide
  modified_base 15: mod_base = OTHER; note = 2'-O-methyl modified nucleotide
  modified_base 16: mod_base = OTHER; note = 2'-O-methyl modified nucleotide
  modified_base 17: mod_base = OTHER; note = 2'-O-methyl modified nucleotide with thiophosphate linkage
  modified_base 18: mod_base = OTHER; note = 2'-O-methyl modified nucleotide
ggacagagttatcgagga

SEQ ID NO: 770 - RNA, 19 nt, synthetic construct
  source 1..19: mol_type = other RNA
  modified_base 1: mod_base = OTHER; note = 2'-O-methyl modified nucleotide with thiophosphate linkage
  modified_base 2: mod_base = OTHER; note = 2'-O-methyl modified nucleotide with thiophosphate linkage
  modified_base 3: mod_base = OTHER; note = 2'-O-methyl modified nucleotide
  modified_base 4: mod_base = OTHER; note = 2'-O-methyl modified nucleotide
  modified_base 5: mod_base = OTHER; note = 2'-O-methyl modified nucleotide
  modified_base 6: mod_base = OTHER; note = 2'-O-methyl modified nucleotide
  modified_base 7: mod_base = OTHER; note = 2'-fluoro modified nucleotide
  modified_base 8: mod_base = OTHER; note = 2'-O-methyl modified nucleotide
  modified_base 9: mod_base = OTHER; note = 2'-fluoro modified nucleotide
  modified_base 10: mod_base = OTHER; note = 2'-O-methyl modified nucleotide
  modified_base 11: mod_base = OTHER; note = 2'-fluoro modified nucleotide
  modified_base 12: mod_base = OTHER; note = 2'-O-methyl modified nucleotide
  modified_base 13: mod_base = OTHER; note = 2'-O-methyl modified nucleotide
  modified_base 14: mod_base = OTHER; note = 2'-O-methyl modified nucleotide
  modified_base 15: mod_base = OTHER; note = 2'-O-methyl modified nucleotide
  modified_base 16: mod_base = OTHER; note = 2'-O-methyl modified nucleotide
  modified_base 17: mod_base = OTHER; note = 2'-O-methyl modified nucleotide
  modified_base 18: mod_base = OTHER; note = 2'-O-methyl modified nucleotide with thiophosphate linkage
  modified_base 19: mod_base = OTHER; note = 2'-O-methyl modified nucleotide
aggacagagttatcgagga

SEQ ID NO: 771 - RNA, 19 nt, synthetic construct
  source 1..19: mol_type = other RNA
  modified_base 1: mod_base = OTHER; note = 2'-O-methyl modified nucleotide with thiophosphate linkage
  modified_base 2: mod_base = OTHER; note = 2'-O-methyl modified nucleotide with thiophosphate linkage
  modified_base 3: mod_base = OTHER; note = 2'-O-methyl modified nucleotide
  modified_base 4: mod_base = OTHER; note = 2'-O-methyl modified nucleotide
  modified_base 5: mod_base = OTHER; note = 2'-O-methyl modified nucleotide
  modified_base 6: mod_base = OTHER; note = 2'-O-methyl modified nucleotide
  modified_base 7: mod_base = OTHER; note = 2'-fluoro modified nucleotide
  modified_base 8: mod_base = OTHER; note = 2'-O-methyl modified nucleotide
  modified_base 9: mod_base = OTHER; note = 2'-fluoro modified nucleotide
  modified_base 10: mod_base = OTHER; note = 2'-O-methyl modified nucleotide
  modified_base 11: mod_base = OTHER; note = 2'-fluoro modified nucleotide
  modified_base 12: mod_base = OTHER; note = 2'-O-methyl modified nucleotide
  modified_base 13: mod_base = OTHER; note = 2'-O-methyl modified nucleotide
  modified_base 14: mod_base = OTHER; note = 2'-O-methyl modified nucleotide
  modified_base 15: mod_base = OTHER; note = 2'-O-methyl modified nucleotide
  modified_base 16: mod_base = OTHER; note = 2'-O-methyl modified nucleotide
  modified_base 17: mod_base = OTHER; note = 2'-O-methyl modified nucleotide
  modified_base 18: mod_base = OTHER; note = 2'-O-methyl modified nucleotide with thiophosphate linkage
  modified_base 19: mod_base = OTHER; note = 2'-O-methyl modified nucleotide
tggacagagttatcgagga

SEQ ID NO: 772 - RNA, 19 nt, synthetic construct
  source 1..19: mol_type = other RNA
  modified_base 1: mod_base = OTHER; note = 2'-O-methyl modified nucleotide with thiophosphate linkage
  modified_base 2: mod_base = OTHER; note = 2'-O-methyl modified nucleotide with thiophosphate linkage
  modified_base 3: mod_base = OTHER; note = 2'-O-methyl modified nucleotide
  modified_base 4: mod_base = OTHER; note = 2'-O-methyl modified nucleotide
  modified_base 5: mod_base = OTHER; note = 2'-O-methyl modified nucleotide
  modified_base 6: mod_base = OTHER; note = 2'-O-methyl modified nucleotide
  modified_base 7: mod_base = OTHER; note = 2'-fluoro modified nucleotide
  modified_base 8: mod_base = OTHER; note = 2'-O-methyl modified nucleotide
  modified_base 9: mod_base = OTHER; note = 2'-fluoro modified nucleotide
  modified_base 10: mod_base = OTHER; note = 2'-O-methyl modified nucleotide
  modified_base 11: mod_base = OTHER; note = 2'-fluoro modified nucleotide
  modified_base 12: mod_base = OTHER; note = 2'-O-methyl modified nucleotide
  modified_base 13: mod_base = OTHER; note = 2'-O-methyl modified nucleotide
  modified_base 14: mod_base = OTHER; note = 2'-O-methyl modified nucleotide
  modified_base 15: mod_base = OTHER; note = 2'-O-methyl modified nucleotide
  modified_base 16: mod_base = OTHER; note = 2'-O-methyl modified nucleotide
  modified_base 17: mod_base = OTHER; note = 2'-O-methyl modified nucleotide
  modified_base 18: mod_base = OTHER; note = 2'-O-methyl modified nucleotide with thiophosphate linkage
  modified_base 19: mod_base = OTHER; note = 2'-O-methyl modified nucleotide
gggacagagttatcgagga

SEQ ID NO: 773 - RNA, 19 nt, synthetic construct
  source 1..19: mol_type = other RNA
  modified_base 1: mod_base = OTHER; note = 2'-O-methyl modified nucleotide with thiophosphate linkage
  modified_base 2: mod_base = OTHER; note = 2'-O-methyl modified nucleotide with thiophosphate linkage
  modified_base 3: mod_base = OTHER; note = 2'-O-methyl modified nucleotide
  modified_base 4: mod_base = OTHER; note = 2'-O-methyl modified nucleotide
  modified_base 5: mod_base = OTHER; note = 2'-O-methyl modified nucleotide
  modified_base 6: mod_base = OTHER; note = 2'-O-methyl modified nucleotide
  modified_base 7: mod_base = OTHER; note = 2'-fluoro modified nucleotide
  modified_base 8: mod_base = OTHER; note = 2'-O-methyl modified nucleotide
  modified_base 9: mod_base = OTHER; note = 2'-fluoro modified nucleotide
  modified_base 10: mod_base = OTHER; note = 2'-O-methyl modified nucleotide
  modified_base 11: mod_base = OTHER; note = 2'-fluoro modified nucleotide
  modified_base 12: mod_base = OTHER; note = 2'-O-methyl modified nucleotide
  modified_base 13: mod_base = OTHER; note = 2'-O-methyl modified nucleotide
  modified_base 14: mod_base = OTHER; note = 2'-O-methyl modified nucleotide
  modified_base 15: mod_base = OTHER; note = 2'-O-methyl modified nucleotide
  modified_base 16: mod_base = OTHER; note = 2'-O-methyl modified nucleotide
  modified_base 17: mod_base = OTHER; note = 2'-O-methyl modified nucleotide
  modified_base 18: mod_base = OTHER; note = 2'-O-methyl modified nucleotide with thiophosphate linkage
  modified_base 19: mod_base = OTHER; note = 2'-O-methyl modified nucleotide
cggacagagttatcgagga

SEQ ID NO: 774 - RNA, 20 nt, synthetic construct
  source 1..20: mol_type = other RNA
  modified_base 1: mod_base = OTHER; note = 2'-O-methyl modified nucleotide with thiophosphate linkage
  modified_base 2: mod_base = OTHER; note = 2'-O-methyl modified nucleotide with thiophosphate linkage
  modified_base 3: mod_base = OTHER; note = 2'-O-methyl modified nucleotide
  modified_base 4: mod_base = OTHER; note = 2'-O-methyl modified nucleotide
  modified_base 5: mod_base = OTHER; note = 2'-O-methyl modified nucleotide
  modified_base 6: mod_base = OTHER; note = 2'-O-methyl modified nucleotide
  modified_base 7: mod_base = OTHER; note = 2'-O-methyl modified nucleotide
  modified_base 8: mod_base = OTHER; note = 2'-fluoro modified nucleotide
  modified_base 9: mod_base = OTHER; note = 2'-O-methyl modified nucleotide
  modified_base 10: mod_base = OTHER; note = 2'-fluoro modified nucleotide
  modified_base 11: mod_base = OTHER; note = 2'-O-methyl modified nucleotide
  modified_base 12: mod_base = OTHER; note = 2'-fluoro modified nucleotide
  modified_base 13: mod_base = OTHER; note = 2'-O-methyl modified nucleotide
  modified_base 14: mod_base = OTHER; note = 2'-O-methyl modified nucleotide
  modified_base 15: mod_base = OTHER; note = 2'-O-methyl modified nucleotide
  modified_base 16: mod_base = OTHER; note = 2'-O-methyl modified nucleotide
  modified_base 17: mod_base = OTHER; note = 2'-O-methyl modified nucleotide
  modified_base 18: mod_base = OTHER; note = 2'-O-methyl modified nucleotide
  modified_base 19: mod_base = OTHER; note = 2'-O-methyl modified nucleotide with thiophosphate linkage
  modified_base 20: mod_base = OTHER; note = 2'-O-methyl modified nucleotide
atggacagagttatcgagga

SEQ ID NO: 775 - RNA, 20 nt, synthetic construct
  source 1..20: mol_type = other RNA
  modified_base 1: mod_base = OTHER; note = 2'-O-methyl modified nucleotide with thiophosphate linkage
  modified_base 2: mod_base = OTHER; note = 2'-O-methyl modified nucleotide with thiophosphate linkage
  modified_base 3: mod_base = OTHER; note = 2'-O-methyl modified nucleotide
  modified_base 4: mod_base = OTHER; note = 2'-O-methyl modified nucleotide
  modified_base 5: mod_base = OTHER; note = 2'-O-methyl modified nucleotide
  modified_base 6: mod_base = OTHER; note = 2'-O-methyl modified nucleotide
  modified_base 7: mod_base = OTHER; note = 2'-O-methyl modified nucleotide
  modified_base 8: mod_base = OTHER; note = 2'-fluoro modified nucleotide
  modified_base 9: mod_base = OTHER; note = 2'-O-methyl modified nucleotide
  modified_base 10: mod_base = OTHER; note = 2'-fluoro modified nucleotide
  modified_base 11: mod_base = OTHER; note = 2'-O-methyl modified nucleotide
  modified_base 12: mod_base = OTHER; note = 2'-fluoro modified nucleotide
  modified_base 13: mod_base = OTHER; note = 2'-O-methyl modified nucleotide
  modified_base 14: mod_base = OTHER; note = 2'-O-methyl modified nucleotide
  modified_base 15: mod_base = OTHER; note = 2'-O-methyl modified nucleotide
  modified_base 16: mod_base = OTHER; note = 2'-O-methyl modified nucleotide
  modified_base 17: mod_base = OTHER; note = 2'-O-methyl modified nucleotide
  modified_base 18: mod_base = OTHER; note = 2'-O-methyl modified nucleotide
  modified_base 19: mod_base = OTHER; note = 2'-O-methyl modified nucleotide with thiophosphate linkage
  modified_base 20: mod_base = OTHER; note = 2'-O-methyl modified nucleotide
ttggacagagttatcgagga

SEQ ID NO: 776 - RNA, 20 nt, synthetic construct
  source 1..20: mol_type = other RNA
  modified_base 1: mod_base = OTHER; note = 2'-O-methyl modified nucleotide with thiophosphate linkage
  modified_base 2: mod_base = OTHER; note = 2'-O-methyl modified nucleotide with thiophosphate linkage
  modified_base 3: mod_base = OTHER; note = 2'-O-methyl modified nucleotide
  modified_base 4: mod_base = OTHER; note = 2'-O-methyl modified nucleotide
  modified_base 5: mod_base = OTHER; note = 2'-O-methyl modified nucleotide
  modified_base 6: mod_base = OTHER; note = 2'-O-methyl modified nucleotide
  modified_base 7: mod_base = OTHER; note = 2'-O-methyl modified nucleotide
  modified_base 8: mod_base = OTHER; note = 2'-fluoro modified nucleotide
  modified_base 9: mod_base = OTHER; note = 2'-O-methyl modified nucleotide
  modified_base 10: mod_base = OTHER; note = 2'-fluoro modified nucleotide
  modified_base 11: mod_base = OTHER; note = 2'-O-methyl modified nucleotide
  modified_base 12: mod_base = OTHER; note = 2'-fluoro modified nucleotide
  modified_base 13: mod_base = OTHER; note = 2'-O-methyl modified nucleotide
  modified_base 14: mod_base = OTHER; note = 2'-O-methyl modified nucleotide
  modified_base 15: mod_base = OTHER; note = 2'-O-methyl modified nucleotide
  modified_base 16: mod_base = OTHER; note = 2'-O-methyl modified nucleotide
  modified_base 17: mod_base = OTHER; note = 2'-O-methyl modified nucleotide
  modified_base 18: mod_base = OTHER; note = 2'-O-methyl modified nucleotide
  modified_base 19: mod_base = OTHER; note = 2'-O-methyl modified nucleotide with thiophosphate linkage
  modified_base 20: mod_base = OTHER; note = 2'-O-methyl modified nucleotide
gtggacagagttatcgagga

SEQ ID NO: 777 - RNA, 20 nt, synthetic construct
  source 1..20: mol_type = other RNA
  modified_base 1: mod_base = OTHER; note = 2'-O-methyl modified nucleotide with thiophosphate linkage
  modified_base 2: mod_base = OTHER; note = 2'-O-methyl modified nucleotide with thiophosphate linkage
  modified_base 3: mod_base = OTHER; note = 2'-O-methyl modified nucleotide
  modified_base 4: mod_base = OTHER; note = 2'-O-methyl modified nucleotide
  modified_base 5: mod_base = OTHER; note = 2'-O-methyl modified nucleotide
  modified_base 6: mod_base = OTHER; note = 2'-O-methyl modified nucleotide
  modified_base 7: mod_base = OTHER; note = 2'-O-methyl modified nucleotide
  modified_base 8: mod_base = OTHER; note = 2'-fluoro modified nucleotide
  modified_base 9: mod_base = OTHER; note = 2'-O-methyl modified nucleotide
  modified_base 10: mod_base = OTHER; note = 2'-fluoro modified nucleotide
  modified_base 11: mod_base = OTHER; note = 2'-O-methyl modified nucleotide
  modified_base 12: mod_base = OTHER; note = 2'-fluoro modified nucleotide
  modified_base 13: mod_base = OTHER; note = 2'-O-methyl modified nucleotide
  modified_base 14: mod_base = OTHER; note = 2'-O-methyl modified nucleotide
  modified_base 15: mod_base = OTHER; note = 2'-O-methyl modified nucleotide
  modified_base 16: mod_base = OTHER; note = 2'-O-methyl modified nucleotide
  modified_base 17: mod_base = OTHER; note = 2'-O-methyl modified nucleotide
  modified_base 18: mod_base = OTHER; note = 2'-O-methyl modified nucleotide
  modified_base 19: mod_base = OTHER; note = 2'-O-methyl modified nucleotide with thiophosphate linkage
  modified_base 20: mod_base = OTHER; note = 2'-O-methyl modified nucleotide
ctggacagagttatcgagga

SEQ ID NO: 778 - RNA, 21 nt, synthetic construct
  source 1..21: mol_type = other RNA
  modified_base 1: mod_base = OTHER; note = 2'-O-methyl modified nucleotide with thiophosphate linkage
  modified_base 2: mod_base = OTHER; note = 2'-O-methyl modified nucleotide with thiophosphate linkage
  modified_base 3: mod_base = OTHER; note = 2'-O-methyl modified nucleotide
  modified_base 4: mod_base = OTHER; note = 2'-O-methyl modified nucleotide
  modified_base 5: mod_base = OTHER; note = 2'-O-methyl modified nucleotide
  modified_base 6: mod_base = OTHER; note = 2'-O-methyl modified nucleotide
  modified_base 7: mod_base = OTHER; note = 2'-O-methyl modified nucleotide
  modified_base 8: mod_base = OTHER; note = 2'-O-methyl modified nucleotide
  modified_base 9: mod_base = OTHER; note = 2'-fluoro modified nucleotide
  modified_base 10: mod_base = OTHER; note = 2'-O-methyl modified nucleotide
  modified_base 11: mod_base = OTHER; note = 2'-fluoro modified nucleotide
  modified_base 12: mod_base = OTHER; note = 2'-O-methyl modified nucleotide
  modified_base 13: mod_base = OTHER; note = 2'-fluoro modified nucleotide
  modified_base 14: mod_base = OTHER; note = 2'-O-methyl modified nucleotide
  modified_base 15: mod_base = OTHER; note = 2'-O-methyl modified nucleotide
  modified_base 16: mod_base = OTHER; note = 2'-O-methyl modified nucleotide
  modified_base 17: mod_base = OTHER; note = 2'-O-methyl modified nucleotide
  modified_base 18: mod_base = OTHER; note = 2'-O-methyl modified nucleotide
  modified_base 19: mod_base = OTHER; note = 2'-O-methyl modified nucleotide
  modified_base 20: mod_base = OTHER; note = 2'-O-methyl modified nucleotide with thiophosphate linkage
  modified_base 21: mod_base = OTHER; note = 2'-O-methyl modified nucleotide
tatggacagagttatcgagga

SEQ ID NO: 779 - RNA, 21 nt, synthetic construct
  source 1..21: mol_type = other RNA
  modified_base 1: mod_base = OTHER; note = 2'-O-methyl modified nucleotide with thiophosphate linkage
  modified_base 2: mod_base = OTHER; note = 2'-O-methyl modified nucleotide with thiophosphate linkage
  modified_base 3: mod_base = OTHER; note = 2'-O-methyl modified nucleotide
  modified_base 4: mod_base = OTHER; note = 2'-O-methyl modified nucleotide
  modified_base 5: mod_base = OTHER; note = 2'-O-methyl modified nucleotide
  modified_base 6: mod_base = OTHER; note = 2'-O-methyl modified nucleotide
  modified_base 7: mod_base = OTHER; note = 2'-O-methyl modified nucleotide
  modified_base 8: mod_base = OTHER; note = 2'-O-methyl modified nucleotide
  modified_base 9: mod_base = OTHER; note = 2'-fluoro modified nucleotide
  modified_base 10: mod_base = OTHER; note = 2'-O-methyl modified nucleotide
  modified_base 11: mod_base = OTHER; note = 2'-fluoro modified nucleotide
  modified_base 12: mod_base = OTHER; note = 2'-O-methyl modified nucleotide
  modified_base 13: mod_base = OTHER; note = 2'-fluoro modified nucleotide
  modified_base 14: mod_base = OTHER; note = 2'-O-methyl modified nucleotide
  modified_base 15: mod_base = OTHER; note = 2'-O-methyl modified nucleotide
  modified_base 16: mod_base = OTHER; note = 2'-O-methyl modified nucleotide
  modified_base 17: mod_base = OTHER; note = 2'-O-methyl modified nucleotide
  modified_base 18: mod_base = OTHER; note = 2'-O-methyl modified nucleotide
  modified_base 19: mod_base = OTHER; note = 2'-O-methyl modified nucleotide
  modified_base 20: mod_base = OTHER; note = 2'-O-methyl modified nucleotide with thiophosphate linkage
  modified_base 21: mod_base = OTHER; note = 2'-O-methyl modified nucleotide
gatggacagagttatcgagga

SEQ ID NO: 780 - RNA, 21 nt, synthetic construct
  source 1..21: mol_type = other RNA
  modified_base 1: mod_base = OTHER; note = 2'-O-methyl modified nucleotide with thiophosphate linkage
  modified_base 2: mod_base = OTHER; note = 2'-O-methyl modified nucleotide with thiophosphate linkage
  modified_base 3: mod_base = OTHER; note = 2'-O-methyl modified nucleotide
  modified_base 4: mod_base = OTHER; note = 2'-O-methyl modified nucleotide
  modified_base 5: mod_base = OTHER; note = 2'-O-methyl modified nucleotide
  modified_base 6: mod_base = OTHER; note = 2'-O-methyl modified nucleotide
  modified_base 7: mod_base = OTHER; note = 2'-O-methyl modified nucleotide
  modified_base 8: mod_base = OTHER; note = 2'-O-methyl modified nucleotide
  modified_base 9: mod_base = OTHER; note = 2'-fluoro modified nucleotide
  modified_base 10: mod_base = OTHER; note = 2'-O-methyl modified nucleotide
  modified_base 11: mod_base = OTHER; note = 2'-fluoro modified nucleotide
  modified_base 12: mod_base = OTHER; note = 2'-O-methyl modified nucleotide
  modified_base 13: mod_base = OTHER; note = 2'-fluoro modified nucleotide
  modified_base 14: mod_base = OTHER; note = 2'-O-methyl modified nucleotide
  modified_base 15: mod_base = OTHER; note = 2'-O-methyl modified nucleotide
  modified_base 16: mod_base = OTHER; note = 2'-O-methyl modified nucleotide
  modified_base 17: mod_base = OTHER; note = 2'-O-methyl modified nucleotide
  modified_base 18: mod_base = OTHER; note = 2'-O-methyl modified nucleotide
  modified_base 19: mod_base = OTHER; note = 2'-O-methyl modified nucleotide
  modified_base 20: mod_base = OTHER; note = 2'-O-methyl modified nucleotide with thiophosphate linkage
  modified_base 21: mod_base = OTHER; note = 2'-O-methyl modified nucleotide
aatggacagagttatcgagga

SEQ ID NO: 781 - RNA, 22 nt, synthetic construct
  source 1..22: mol_type = other RNA
  modified_base 1: mod_base = OTHER; note = 2'-O-methyl modified nucleotide with thiophosphate linkage
  modified_base 2: mod_base = OTHER; note = 2'-O-methyl modified nucleotide with thiophosphate linkage
  modified_base 3: mod_base = OTHER; note = 2'-O-methyl modified nucleotide
  modified_base 4: mod_base = OTHER; note = 2'-O-methyl modified nucleotide
  modified_base 5: mod_base = OTHER; note = 2'-O-methyl modified nucleotide
  modified_base 6: mod_base = OTHER; note = 2'-O-methyl modified nucleotide
  modified_base 7: mod_base = OTHER; note = 2'-O-methyl modified nucleotide
  modified_base 8: mod_base = OTHER; note = 2'-O-methyl modified nucleotide
  modified_base 9: mod_base = OTHER; note = 2'-O-methyl modified nucleotide
  modified_base 10: mod_base = OTHER; note = 2'-fluoro modified nucleotide
  modified_base 11: mod_base = OTHER; note = 2'-O-methyl modified nucleotide
  modified_base 12: mod_base = OTHER; note = 2'-fluoro modified nucleotide
  modified_base 13: mod_base = OTHER; note = 2'-O-methyl modified nucleotide
  modified_base 14: mod_base = OTHER; note = 2'-fluoro modified nucleotide
  modified_base 15: mod_base = OTHER; note = 2'-O-methyl modified nucleotide
  modified_base 16: mod_base = OTHER; note = 2'-O-methyl modified nucleotide
  modified_base 17: mod_base = OTHER; note = 2'-O-methyl modified nucleotide
  modified_base 18: mod_base = OTHER; note = 2'-O-methyl modified nucleotide
  modified_base 19: mod_base = OTHER; note = 2'-O-methyl modified nucleotide
  modified_base 20: mod_base = OTHER; note = 2'-O-methyl modified nucleotide
  modified_base 21: mod_base = OTHER; note = 2'-O-methyl modified nucleotide with thiophosphate linkage
  modified_base 22: mod_base = OTHER; note = 2'-O-methyl modified nucleotide
tgatggacagagttatcgagga

SEQ ID NO: 782 - RNA, 23 nt, synthetic construct
  source 1..23: mol_type = other RNA
  modified_base 1: mod_base = OTHER; note = 2'-O-methyl modified nucleotide with thiophosphate linkage
  modified_base 2: mod_base = OTHER; note = 2'-O-methyl modified nucleotide with thiophosphate linkage
  modified_base 3: mod_base = OTHER; note = 2'-O-methyl modified nucleotide
  modified_base 4: mod_base = OTHER; note = 2'-O-methyl modified nucleotide
  modified_base 5: mod_base = OTHER; note = 2'-O-methyl modified nucleotide
  modified_base 6: mod_base = OTHER; note = 2'-O-methyl modified nucleotide
  modified_base 7: mod_base = OTHER; note = 2'-O-methyl modified nucleotide
  modified_base 8: mod_base = OTHER; note = 2'-O-methyl modified nucleotide
  modified_base 9: mod_base = OTHER; note = 2'-O-methyl modified nucleotide
  modified_base 10: mod_base = OTHER; note = 2'-O-methyl modified nucleotide
  modified_base 11: mod_base = OTHER; note = 2'-fluoro modified nucleotide
  modified_base 12: mod_base = OTHER; note = 2'-O-methyl modified nucleotide
  modified_base 13: mod_base = OTHER; note = 2'-fluoro modified nucleotide
  modified_base 14: mod_base = OTHER; note = 2'-O-methyl modified nucleotide
  modified_base 15: mod_base = OTHER; note = 2'-fluoro modified nucleotide
  modified_base 16: mod_base = OTHER; note = 2'-O-methyl modified nucleotide
  modified_base 17: mod_base = OTHER; note = 2'-O-methyl modified nucleotide
  modified_base 18: mod_base = OTHER; note = 2'-O-methyl modified nucleotide
  modified_base 19: mod_base = OTHER; note = 2'-O-methyl modified nucleotide
  modified_base 20: mod_base = OTHER; note = 2'-O-methyl modified nucleotide
  modified_base 21: mod_base = OTHER; note = 2'-O-methyl modified nucleotide
  modified_base 22: mod_base = OTHER; note = 2'-O-methyl modified nucleotide with thiophosphate linkage
  modified_base 23: mod_base = OTHER; note = 2'-O-methyl modified nucleotide
gtgatggacagagttatcgagga

SEQ ID NO: 783 - RNA, 24 nt, synthetic construct
  source 1..24: mol_type = other RNA
  modified_base 1: mod_base = OTHER; note = 2'-O-methyl modified nucleotide with thiophosphate linkage
  modified_base 2: mod_base = OTHER; note = 2'-O-methyl modified nucleotide with thiophosphate linkage
  modified_base 3: mod_base = OTHER; note = 2'-O-methyl modified nucleotide
  modified_base 4: mod_base = OTHER; note = 2'-O-methyl modified nucleotide
  modified_base 5: mod_base = OTHER; note = 2'-O-methyl modified nucleotide
  modified_base 6: mod_base = OTHER; note = 2'-O-methyl modified nucleotide
  modified_base 7: mod_base = OTHER; note = 2'-O-methyl modified nucleotide
  modified_base 8: mod_base = OTHER; note = 2'-O-methyl modified nucleotide
  modified_base 9: mod_base = OTHER; note = 2'-O-methyl modified nucleotide
  modified_base 10: mod_base = OTHER; note = 2'-O-methyl modified nucleotide
  modified_base 11: mod_base = OTHER; note = 2'-O-methyl modified nucleotide
  modified_base 12: mod_base = OTHER; note = 2'-fluoro modified nucleotide
  modified_base 13: mod_base = OTHER; note = 2'-O-methyl modified nucleotide
  modified_base 14: mod_base = OTHER; note = 2'-fluoro modified nucleotide
  modified_base 15: mod_base = OTHER; note = 2'-O-methyl modified nucleotide
  modified_base 16: mod_base = OTHER; note = 2'-fluoro modified nucleotide
  modified_base 17: mod_base = OTHER; note = 2'-O-methyl modified nucleotide
  modified_base 18: mod_base = OTHER; note = 2'-O-methyl modified nucleotide
  modified_base 19: mod_base = OTHER; note = 2'-O-methyl modified nucleotide
  modified_base 20: mod_base = OTHER; note = 2'-O-methyl modified nucleotide
  modified_base 21: mod_base = OTHER; note = 2'-O-methyl modified nucleotide
  modified_base 22: mod_base = OTHER; note = 2'-O-methyl modified nucleotide
  modified_base 23: mod_base = OTHER; note = 2'-O-methyl modified nucleotide with thiophosphate linkage
  modified_base 24: mod_base = OTHER; note = 2'-O-methyl modified nucleotide
ggtgatggacagagttatcgagga

SEQ ID NO: 784 - RNA, 25 nt, synthetic construct
  source 1..25: mol_type = other RNA
  modified_base 1: mod_base = OTHER; note = 2'-O-methyl modified nucleotide with thiophosphate linkage
  modified_base 2: mod_base = OTHER; note = 2'-O-methyl modified nucleotide with thiophosphate linkage
  modified_base 3: mod_base = OTHER; note = 2'-O-methyl modified nucleotide
  modified_base 4: mod_base = OTHER; note = 2'-O-methyl modified nucleotide
  modified_base 5: mod_base = OTHER; note = 2'-O-methyl modified nucleotide
  modified_base 6: mod_base = OTHER; note = 2'-O-methyl modified nucleotide
  modified_base 7: mod_base = OTHER; note = 2'-O-methyl modified nucleotide
  modified_base 8: mod_base = OTHER; note = 2'-O-methyl modified nucleotide
  modified_base 9: mod_base = OTHER; note = 2'-O-methyl modified nucleotide
  modified_base 10: mod_base = OTHER; note = 2'-O-methyl modified nucleotide
  modified_base 11: mod_base = OTHER; note = 2'-O-methyl modified nucleotide
  modified_base 12: mod_base = OTHER; note = 2'-O-methyl modified nucleotide
  modified_base 13: mod_base = OTHER; note = 2'-fluoro modified nucleotide
  modified_base 14: mod_base = OTHER; note = 2'-O-methyl modified nucleotide
  modified_base 15: mod_base = OTHER; note = 2'-fluoro modified nucleotide
  modified_base 16: mod_base = OTHER; note = 2'-O-methyl modified nucleotide
  modified_base 17: mod_base = OTHER; note = 2'-fluoro modified nucleotide
  modified_base 18: mod_base = OTHER; note = 2'-O-methyl modified nucleotide
  modified_base 19: mod_base = OTHER; note = 2'-O-methyl modified nucleotide
  modified_base 20: mod_base = OTHER; note = 2'-O-methyl modified nucleotide
  modified_base 21: mod_base = OTHER; note = 2'-O-methyl modified nucleotide
  modified_base 22: mod_base = OTHER; note = 2'-O-methyl modified nucleotide
  modified_base 23: mod_base = OTHER; note = 2'-O-methyl modified nucleotide
  modified_base 24: mod_base = OTHER; note = 2'-O-methyl modified nucleotide with thiophosphate linkage
  modified_base 25: mod_base = OTHER; note = 2'-O-methyl modified nucleotide
tggtgatggacagagttatcgagga

SEQ ID NO: 785 - RNA, 26 nt, synthetic construct
  source 1..26: mol_type = other RNA
  modified_base 1: mod_base = OTHER; note = 2'-O-methyl modified nucleotide with thiophosphate linkage
  modified_base 2: mod_base = OTHER; note = 2'-O-methyl modified nucleotide with thiophosphate linkage
  modified_base 3: mod_base = OTHER; note = 2'-O-methyl modified nucleotide
  modified_base 4: mod_base = OTHER; note = 2'-O-methyl modified nucleotide
  modified_base 5: mod_base = OTHER; note = 2'-O-methyl modified nucleotide
  modified_base 6: mod_base = OTHER; note = 2'-O-methyl modified nucleotide
  modified_base 7: mod_base = OTHER; note = 2'-O-methyl modified nucleotide
  modified_base 8: mod_base = OTHER; note = 2'-O-methyl modified nucleotide
  modified_base 9: mod_base = OTHER; note = 2'-O-methyl modified nucleotide
  modified_base 10: mod_base = OTHER; note = 2'-O-methyl modified nucleotide
  modified_base 11: mod_base = OTHER; note = 2'-O-methyl modified nucleotide
  modified_base 12: mod_base = OTHER; note = 2'-O-methyl modified nucleotide
  modified_base 13: mod_base = OTHER; note = 2'-O-methyl modified nucleotide
  modified_base 14: mod_base = OTHER; note = 2'-fluoro modified nucleotide
  modified_base 15: mod_base = OTHER; note = 2'-O-methyl modified nucleotide
  modified_base 16: mod_base = OTHER; note = 2'-fluoro modified nucleotide
  modified_base 17: mod_base = OTHER; note = 2'-O-methyl modified nucleotide
  modified_base 18: mod_base = OTHER; note = 2'-fluoro modified nucleotide
  modified_base 19: mod_base = OTHER; note = 2'-O-methyl modified nucleotide
  modified_base 20: mod_base = OTHER; note = 2'-O-methyl modified nucleotide
  modified_base 21: mod_base = OTHER; note = 2'-O-methyl modified nucleotide
  modified_base 22: mod_base = OTHER; note = 2'-O-methyl modified nucleotide
  modified_base 23: mod_base = OTHER; note = 2'-O-methyl modified nucleotide
  modified_base 24: mod_base = OTHER; note = 2'-O-methyl modified nucleotide
  modified_base 25: mod_base = OTHER; note = 2'-O-methyl modified nucleotide with thiophosphate linkage
  modified_base 26: mod_base = OTHER; note = 2'-O-methyl modified nucleotide
atggtgatggacagagttatcgagga

SEQ ID NO: 786 - RNA, 32 nt, synthetic construct; identical to SEQ ID NO: 599
  source 1..32: mol_type = other RNA
  modified_base 1: mod_base = OTHER; note = 2'-O-methyl modified nucleotide with thiophosphate linkage
  modified_base 2: mod_base = OTHER; note = 2'-O-methyl modified nucleotide with thiophosphate linkage
  modified_base 3: mod_base = OTHER; note = 2'-O-methyl modified nucleotide
  modified_base 4: mod_base = OTHER; note = 2'-O-methyl modified nucleotide
  modified_base 5: mod_base = OTHER; note = 2'-O-methyl modified nucleotide
  modified_base 6: mod_base = OTHER; note = 2'-O-methyl modified nucleotide
  modified_base 7: mod_base = OTHER; note = 2'-O-methyl modified nucleotide
  modified_base 8: mod_base = OTHER; note = 2'-O-methyl modified nucleotide
  modified_base 9: mod_base = OTHER; note = 2'-O-methyl modified nucleotide
  modified_base 10: mod_base = OTHER; note = 2'-O-methyl modified nucleotide
  modified_base 11: mod_base = OTHER; note = 2'-O-methyl modified nucleotide
  modified_base 12: mod_base = OTHER; note = 2'-O-methyl modified nucleotide
  modified_base 13: mod_base = OTHER; note = 2'-O-methyl modified nucleotide
  modified_base 14: mod_base = OTHER; note = 2'-O-methyl modified nucleotide
  modified_base 15: mod_base = OTHER; note = 2'-O-methyl modified nucleotide
  modified_base 16: mod_base = OTHER; note = 2'-O-methyl modified nucleotide
  modified_base 17: mod_base = OTHER; note = 2'-O-methyl modified nucleotide
  modified_base 18: mod_base = OTHER; note = 2'-O-methyl modified nucleotide
  modified_base 19: mod_base = OTHER; note = 2'-O-methyl modified nucleotide
  modified_base 20: mod_base = OTHER; note = 2'-fluoro modified nucleotide
  modified_base 21: mod_base = OTHER; note = 2'-O-methyl modified nucleotide
  modified_base 22: mod_base = OTHER; note = 2'-fluoro modified nucleotide
  modified_base 23: mod_base = OTHER; note = 2'-O-methyl modified nucleotide
  modified_base 24: mod_base = OTHER; note = 2'-fluoro modified nucleotide
  modified_base 25: mod_base = OTHER; note = 2'-O-methyl modified nucleotide
  modified_base 26: mod_base = OTHER; note = 2'-O-methyl modified nucleotide
  modified_base 27: mod_base = OTHER; note = 2'-O-methyl modified nucleotide
  modified_base 28: mod_base = OTHER; note = 2'-O-methyl modified nucleotide
  modified_base 29: mod_base = OTHER; note = 2'-O-methyl modified nucleotide
  modified_base 30: mod_base = OTHER; note = 2'-O-methyl modified nucleotide
  modified_base 31: mod_base = OTHER; note = 2'-O-methyl modified nucleotide with thiophosphate linkage
  modified_base 32: mod_base = OTHER; note = 2'-O-methyl modified nucleotide

SEQ ID NO: 787 - RNA, 21 nt, synthetic construct
  source 1..21: mol_type = other RNA
  modified_base 1: mod_base = OTHER; note = 2'-O-methyl modified nucleotide with thiophosphate linkage
  modified_base 2: mod_base = OTHER; note = 2'-O-methyl modified nucleotide with thiophosphate linkage
  modified_base 3: mod_base = OTHER; note = 2'-O-methyl modified nucleotide
  modified_base 4: mod_base = OTHER; note = 2'-O-methyl modified nucleotide
  modified_base 5: mod_base = OTHER; note = 2'-O-methyl modified nucleotide
  modified_base 6: mod_base = OTHER; note = 2'-O-methyl modified nucleotide
  modified_base 7: mod_base = OTHER; note = 2'-O-methyl modified nucleotide
  modified_base 8: mod_base = OTHER; note = 2'-O-methyl modified nucleotide
  modified_base 9: mod_base = OTHER; note = 2'-fluoro modified nucleotide
  modified_base 10: mod_base = OTHER; note = 2'-O-methyl modified nucleotide
  modified_base 11: mod_base = OTHER; note = 2'-fluoro modified nucleotide
  modified_base 12: mod_base = OTHER; note = 2'-O-methyl modified nucleotide
  modified_base 13: mod_base = OTHER; note = 2'-fluoro modified nucleotide
  modified_base 14: mod_base = OTHER; note = 2'-O-methyl modified nucleotide
  modified_base 15: mod_base = OTHER; note = 2'-O-methyl modified nucleotide
  modified_base 16: mod_base = OTHER; note = 2'-O-methyl modified nucleotide
  modified_base 17: mod_base = OTHER; note = 2'-O-methyl modified nucleotide
  modified_base 18: mod_base = OTHER; note = 2'-O-methyl modified nucleotide
  modified_base 19: mod_base = OTHER; note = 2'-O-methyl modified nucleotide
  modified_base 20: mod_base = OTHER; note = 2'-O-methyl modified nucleotide with thiophosphate linkage
  modified_base 21: mod_base = OTHER; note = 2'-O-methyl modified nucleotide
catggacagagttatcgagga

SEQ ID NO: 788 - RNA, 21 nt, synthetic construct
  source 1..21: mol_type = other RNA
  modified_base 1: mod_base = OTHER; note = 2'-O-methyl modified nucleotide with thiophosphate linkage
  modified_base 2: mod_base = OTHER; note = 2'-O-methyl modified nucleotide with thiophosphate linkage
  modified_base 3: mod_base = OTHER; note = 2'-O-methyl modified nucleotide
  modified_base 4: mod_base = OTHER; note = 2'-O-methyl modified nucleotide
  modified_base 5: mod_base = OTHER; note = 2'-O-methyl modified nucleotide
  modified_base 6: mod_base = OTHER; note = 2'-O-methyl modified nucleotide
  modified_base 7: mod_base = OTHER; note = 2'-O-methyl modified nucleotide
  modified_base 8: mod_base = OTHER; note = 2'-O-methyl modified nucleotide
  modified_base 9: mod_base = OTHER; note = 2'-fluoro modified nucleotide
  modified_base 10: mod_base = OTHER; note = 2'-O-methyl modified nucleotide
  modified_base 11: mod_base = OTHER; note = 2'-fluoro modified nucleotide
  modified_base 12: mod_base = OTHER; note = 2'-O-methyl modified nucleotide
  modified_base 13: mod_base = OTHER; note = 2'-fluoro modified nucleotide
  modified_base 14: mod_base = OTHER; note = 2'-O-methyl modified nucleotide
  modified_base 15: mod_base = OTHER; note = 2'-O-methyl modified nucleotide
  modified_base 16: mod_base = OTHER; note = 2'-O-methyl modified nucleotide
  modified_base 17: mod_base = OTHER; note = 2'-O-methyl modified nucleotide
  modified_base 18: mod_base = OTHER; note = 2'-O-methyl modified nucleotide
  modified_base 19: mod_base = OTHER; note = 2'-O-methyl modified nucleotide
  modified_base 20: mod_base = OTHER; note = 2'-O-methyl modified nucleotide with thiophosphate linkage
  modified_base 21: mod_base = OTHER; note = 2'-O-methyl modified nucleotide
catggacagagttatcgagga

SEQ ID NO: 789 - RNA, 21 nt, synthetic construct
  source 1..21: mol_type = other RNA
  modified_base 1: mod_base = OTHER; note = 2'-O-methyl modified nucleotide with thiophosphate linkage
  modified_base 2: mod_base = OTHER; note = 2'-O-methyl modified nucleotide with thiophosphate linkage
  modified_base 3: mod_base = OTHER; note = 2'-O-methyl modified nucleotide
  modified_base 4: mod_base = OTHER; note = 2'-O-methyl modified nucleotide
  modified_base 5: mod_base = OTHER; note = 2'-O-methyl modified nucleotide
  modified_base 6: mod_base = OTHER; note = 2'-O-methyl modified nucleotide
  modified_base 7: mod_base = OTHER; note = 2'-O-methyl modified nucleotide
  modified_base 8: mod_base = OTHER; note = 2'-O-methyl modified nucleotide
  modified_base 9: mod_base = OTHER; note = 2'-fluoro modified nucleotide
  modified_base 10: mod_base = OTHER; note = 2'-O-methyl modified nucleotide
  modified_base 11: mod_base = OTHER; note = 2'-fluoro modified nucleotide
  modified_base 12: mod_base = OTHER; note = 2'-O-methyl modified nucleotide
  modified_base 13: mod_base = OTHER; note = 2'-fluoro modified nucleotide
  modified_base 14: mod_base = OTHER; note = 2'-O-methyl modified nucleotide
  modified_base 15: mod_base = OTHER; note = 2'-O-methyl modified nucleotide
  modified_base 16: mod_base = OTHER; note = 2'-O-methyl modified nucleotide
  modified_base 17: mod_base = OTHER; note = 2'-O-methyl modified nucleotide
  modified_base 18: mod_base = OTHER; note = 2'-O-methyl modified nucleotide
  modified_base 19: mod_base = OTHER; note = 2'-O-methyl modified nucleotide
  modified_base 20: mod_base = OTHER; note = 2'-O-methyl modified nucleotide with thiophosphate linkage
  modified_base 21: mod_base = OTHER; note = 2'-O-methyl modified nucleotide
catggacagagttatcgagga

SEQ ID NO: 790 - RNA, 21 nt, synthetic construct
  source 1..21: mol_type = other RNA
  modified_base 1: mod_base = OTHER; note = 2'-O-methyl modified nucleotide with thiophosphate linkage
  modified_base 2: mod_base = OTHER; note = 2'-O-methyl modified nucleotide with thiophosphate linkage
  modified_base 3: mod_base = OTHER; note = 2'-O-methyl modified nucleotide
  modified_base 4: mod_base = OTHER; note = 2'-O-methyl modified nucleotide
  modified_base 5: mod_base = OTHER; note = 2'-O-methyl modified nucleotide
  modified_base 6: mod_base = OTHER; note = 2'-O-methyl modified nucleotide
  modified_base 7: mod_base = OTHER; note = 2'-O-methyl modified nucleotide
  modified_base 8: mod_base = OTHER; note = 2'-O-methyl modified nucleotide
  modified_base 9: mod_base = OTHER; note = 2'-fluoro modified nucleotide
  modified_base 10: mod_base = OTHER; note = 2'-O-methyl modified nucleotide
  modified_base 11: mod_base = OTHER; note = 2'-fluoro modified nucleotide
  modified_base 12: mod_base = OTHER; note = 2'-O-methyl modified nucleotide
  modified_base 13: mod_base = OTHER; note = 2'-fluoro modified nucleotide
  modified_base 14: mod_base = OTHER; note = 2'-O-methyl modified nucleotide
  modified_base 15: mod_base = OTHER; note = 2'-O-methyl modified nucleotide
  modified_base 16: mod_base = OTHER; note = 2'-O-methyl modified nucleotide
  modified_base 17: mod_base = OTHER; note = 2'-O-methyl modified nucleotide
  modified_base 18: mod_base = OTHER; note = 2'-O-methyl modified nucleotide
  modified_base 19: mod_base = OTHER; note = 2'-O-methyl modified nucleotide
  modified_base 20: mod_base = OTHER; note = 2'-O-methyl modified nucleotide with thiophosphate linkage
  modified_base 21: mod_base = OTHER; note = 2'-O-methyl modified nucleotide
catggacagagttatcgagga

SEQ ID NO: 791 - RNA, 21 nt, synthetic construct
  source 1..21: mol_type = other RNA
  modified_base 1: mod_base = OTHER; note = 2'-O-methyl modified nucleotide with thiophosphate linkage
  modified_base 2: mod_base = OTHER; note = 2'-O-methyl modified nucleotide with thiophosphate linkage
  modified_base 3: mod_base = OTHER; note = 2'-O-methyl modified nucleotide
  modified_base 4: mod_base = OTHER; note = 2'-O-methyl modified nucleotide
  modified_base 5: mod_base = OTHER; note = 2'-O-methyl modified nucleotide
  modified_base 6: mod_base = OTHER; note = 2'-O-methyl modified nucleotide
  modified_base 7: mod_base = OTHER; note = 2'-O-methyl modified nucleotide
  modified_base 8: mod_base = OTHER; note = 2'-O-methyl modified nucleotide
  modified_base 9: mod_base = OTHER; note = 2'-fluoro modified nucleotide
  modified_base 10: mod_base = OTHER; note = 2'-fluoro modified nucleotide
  modified_base 11: mod_base = OTHER; note = 2'-fluoro modified nucleotide
  modified_base 12: mod_base = OTHER; note = 2'-O-methyl modified nucleotide
  modified_base 13: mod_base = OTHER; note = 2'-O-methyl modified nucleotide
  modified_base 14: mod_base = OTHER; note = 2'-O-methyl modified nucleotide
  modified_base 15: mod_base = OTHER; note = 2'-O-methyl modified nucleotide
  modified_base 16: mod_base = OTHER; note = 2'-O-methyl modified nucleotide
  modified_base 17: mod_base = OTHER; note = 2'-O-methyl modified nucleotide
  modified_base 18: mod_base = OTHER; note = 2'-O-methyl modified nucleotide
  modified_base 19: mod_base = OTHER; note = 2'-O-methyl modified nucleotide
  modified_base 20: mod_base = OTHER; note = 2'-O-methyl modified nucleotide with thiophosphate linkage
  modified_base 21: mod_base = OTHER; note = 2'-O-methyl modified nucleotide
catggacagagttatcgagga

SEQ ID NO: 792 - RNA, 21 nt, synthetic construct
  source 1..21: mol_type = other RNA
  modified_base 1: mod_base = OTHER; note = 2'-O-methyl modified nucleotide with thiophosphate linkage
  modified_base 2: mod_base = OTHER; note = 2'-O-methyl modified nucleotide with thiophosphate linkage
  modified_base 3: mod_base = OTHER; note = 2'-O-methyl modified nucleotide
  modified_base 4: mod_base = OTHER; note = 2'-O-methyl modified nucleotide
  modified_base 5: mod_base = OTHER; note = 2'-O-methyl modified nucleotide
  modified_base 6: mod_base = OTHER; note = 2'-O-methyl modified nucleotide
  modified_base 7: mod_base = OTHER; note = 2'-O-methyl modified nucleotide
  modified_base 8: mod_base = OTHER; note = 2'-O-methyl modified nucleotide
  modified_base 9: mod_base = OTHER; note = 2'-fluoro modified nucleotide
  modified_base 10: mod_base = OTHER; note = 2'-O-methyl modified nucleotide
  modified_base 11: mod_base = OTHER; note = 2'-fluoro modified nucleotide
  modified_base 12: mod_base = OTHER; note = 2'-O-methyl modified nucleotide
  modified_base 13: mod_base = OTHER; note = 2'-fluoro modified nucleotide
  modified_base 14: mod_base = OTHER; note = 2'-O-methyl modified nucleotide
  modified_base 15: mod_base = OTHER; note = 2'-O-methyl modified nucleotide
  modified_base 16: mod_base = OTHER; note = 2'-O-methyl modified nucleotide
  modified_base 17: mod_base = OTHER; note = 2'-O-methyl modified nucleotide
  modified_base 18: mod_base = OTHER; note = 2'-O-methyl modified nucleotide
  modified_base 19: mod_base = OTHER; note = 2'-O-methyl modified nucleotide
  modified_base 20: mod_base = OTHER; note = 2'-O-methyl modified nucleotide with thiophosphate linkage
  modified_base 21: mod_base = OTHER; note = 2'-O-methyl modified nucleotide
catggacagagttattgagga

SEQ ID NO: 793 - RNA, 21 nt, synthetic construct
  source 1..21: mol_type = other RNA
  modified_base 1: mod_base = OTHER; note = 2'-O-methyl modified nucleotide with thiophosphate linkage
  modified_base 2: mod_base = OTHER; note = 2'-O-methyl modified nucleotide with thiophosphate linkage
  modified_base 3: mod_base = OTHER; note = 2'-O-methyl modified nucleotide
  modified_base 4: mod_base = OTHER; note = 2'-O-methyl modified nucleotide
  modified_base 5: mod_base = OTHER; note = 2'-O-methyl modified nucleotide
  modified_base 6: mod_base = OTHER; note = 2'-O-methyl modified nucleotide
  modified_base 7: mod_base = OTHER; note = 2'-O-methyl modified nucleotide
  modified_base 8: mod_base = OTHER; note = 2'-O-methyl modified nucleotide
  modified_base 9: mod_base = OTHER; note = 2'-fluoro modified nucleotide
  modified_base 10: mod_base = OTHER; note = 2'-O-methyl modified nucleotide
  modified_base 11: mod_base = OTHER; note = 2'-fluoro modified nucleotide
  modified_base 12: mod_base = OTHER; note = 2'-O-methyl modified nucleotide
  modified_base 13: mod_base = OTHER; note = 2'-fluoro modified nucleotide
  modified_base 14: mod_base = OTHER; note = 2'-O-methyl modified nucleotide
  modified_base 15: mod_base = OTHER; note = 2'-O-methyl modified nucleotide
  modified_base 16: mod_base = OTHER; note = 2'-O-methyl modified nucleotide
  modified_base 17: mod_base = OTHER; note = 2'-O-methyl modified nucleotide
  modified_base 18: mod_base = OTHER; note = 2'-O-methyl modified nucleotide
  modified_base 19: mod_base = OTHER; note = 2'-O-methyl modified nucleotide
  modified_base 20: mod_base = OTHER; note = 2'-O-methyl modified nucleotide with thiophosphate linkage
  modified_base 21: mod_base = OTHER; note = 2'-O-methyl modified nucleotide
catggacagagttatcgagaa

SEQ ID NO: 794 - RNA, 21 nt, synthetic construct
  source 1..21: mol_type = other RNA
  modified_base 1: mod_base = OTHER; note = 2'-O-methyl modified nucleotide with thiophosphate linkage
  modified_base 2: mod_base = OTHER; note = 2'-O-methyl modified nucleotide with thiophosphate linkage
  modified_base 3: mod_base = OTHER; note = 2'-O-methyl modified nucleotide
  modified_base 4: mod_base = OTHER; note = 2'-O-methyl modified nucleotide
  modified_base 5: mod_base = OTHER; note = 2'-O-methyl modified nucleotide
  modified_base 6: mod_base = OTHER; note = 2'-O-methyl modified nucleotide
  modified_base 7: mod_base = OTHER; note = 2'-O-methyl modified nucleotide
  modified_base 8: mod_base = OTHER; note = 2'-O-methyl modified nucleotide
  modified_base 9: mod_base = OTHER; note = 2'-fluoro modified nucleotide
  modified_base 10: mod_base = OTHER; note = 2'-O-methyl modified nucleotide
  modified_base 11: mod_base = OTHER; note = 2'-fluoro modified nucleotide
  modified_base 12: mod_base = OTHER; note = 2'-O-methyl modified nucleotide
  modified_base 13: mod_base = OTHER; note = 2'-fluoro modified nucleotide
  modified_base 14: mod_base = OTHER; note = 2'-O-methyl modified nucleotide
  modified_base 15: mod_base = OTHER; note = 2'-O-methyl modified nucleotide
  modified_base 16: mod_base = OTHER; note = 2'-O-methyl modified nucleotide
  modified_base 17: mod_base = OTHER; note = 2'-O-methyl modified nucleotide
  modified_base 18: mod_base = OTHER; note = 2'-O-methyl modified nucleotide
  modified_base 19: mod_base = OTHER; note = 2'-O-methyl modified nucleotide with thiophosphate linkage
  modified_base 20: mod_base = OTHER; note = 2'-O-methyl modified nucleotide with thiophosphate linkage
  modified_base 21: mod_base = OTHER; note = 2'-O-methyl modified nucleotide
catggacagagttatcgagga

SEQ ID NO: 795 - RNA, 21 nt, synthetic construct
  source 1..21: mol_type = other RNA
  modified_base 1: mod_base = OTHER; note = 2'-O-methyl modified nucleotide with thiophosphate linkage
  modified_base 2: mod_base = OTHER; note = 2'-fluoro modified nucleotide with thiophosphate linkage
  modified_base 3: mod_base = OTHER; note = 2'-O-methyl modified nucleotide
  modified_base 4: mod_base = OTHER; note = 2'-O-methyl modified nucleotide
  modified_base 5: mod_base = OTHER; note = 2'-O-methyl modified nucleotide
  modified_base 6: mod_base = OTHER; note = 2'-O-methyl modified nucleotide
  modified_base 7: mod_base = OTHER; note = 2'-fluoro modified nucleotide
  modified_base 8: mod_base = OTHER; note = 2'-O-methyl modified nucleotide
  modified_base 9: mod_base = OTHER; note = 2'-O-methyl modified nucleotide
  modified_base 10: mod_base = OTHER; note = 2'-O-methyl modified nucleotide
  modified_base 11: mod_base = OTHER; note = 2'-O-methyl modified nucleotide
  modified_base 12: mod_base = OTHER; note = 2'-fluoro modified nucleotide
  modified_base 13: mod_base = OTHER; note = 2'-O-methyl modified nucleotide
  modified_base 14: mod_base = OTHER; note = 2'-fluoro modified nucleotide
  modified_base 15: mod_base = OTHER; note = 2'-O-methyl modified nucleotide
  modified_base 16: mod_base = OTHER; note = 2'-fluoro modified nucleotide
  modified_base 17: mod_base = OTHER; note = 2'-O-methyl modified nucleotide
  modified_base 18: mod_base = OTHER; note = 2'-O-methyl modified nucleotide
  modified_base 19: mod_base = OTHER; note = 2'-O-methyl modified nucleotide with thiophosphate linkage
  modified_base 20: mod_base = OTHER; note = 2'-O-methyl modified nucleotide with thiophosphate linkage
  modified_base 21: mod_base = OTHER; note = 2'-O-methyl modified nucleotide
ttatgtgcctcgataactctc

SEQ ID NO: 796 - RNA, 21 nt, synthetic construct
  source 1..21: mol_type = other RNA
  modified_base 1: mod_base = OTHER; note = 2'-O-methyl modified nucleotide with thiophosphate linkage
  modified_base 2: mod_base = OTHER; note = 2'-fluoro modified nucleotide with thiophosphate linkage
  modified_base 3: mod_base = OTHER; note = 2'-O-methyl modified nucleotide
  modified_base 4: mod_base = OTHER; note = 2'-O-methyl modified nucleotide
  modified_base 5: mod_base = OTHER; note = 2'-O-methyl modified nucleotide
  modified_base 6: mod_base = OTHER; note = 2'-O-methyl modified nucleotide
  modified_base 7: mod_base = OTHER; note = 2'-fluoro modified nucleotide
  modified_base 8: mod_base = OTHER; note = 2'-O-methyl modified nucleotide
  modified_base 9: mod_base = OTHER; note = 2'-O-methyl modified nucleotide
  modified_base 10: mod_base = OTHER; note = 2'-O-methyl modified nucleotide
  modified_base 11: mod_base = OTHER; note = 2'-O-methyl modified nucleotide
  modified_base 12: mod_base = OTHER; note = 2'-fluoro modified nucleotide
  modified_base 13: mod_base = OTHER; note = 2'-O-methyl modified nucleotide
  modified_base 14: mod_base = OTHER; note = 2'-fluoro modified nucleotide
  modified_base 15: mod_base = OTHER; note = 2'-O-methyl modified nucleotide
  modified_base 16: mod_base = OTHER; note = 2'-fluoro modified nucleotide
  modified_base 17: mod_base = OTHER; note = 2'-O-methyl modified nucleotide
  modified_base 18: mod_base = OTHER; note = 2'-O-methyl modified nucleotide
  modified_base 19: mod_base = OTHER; note = 2'-O-methyl modified nucleotide with thiophosphate linkage
  modified_base 20: mod_base = OTHER; note = 2'-O-methyl modified nucleotide with thiophosphate linkage
  modified_base 21: mod_base = OTHER; note = 2'-O-methyl modified nucleotide
atatgtgcctcgataactctc

SEQ ID NO: 797 - RNA, 21 nt, synthetic construct
  source 1..21: mol_type = other RNA
  modified_base 1: mod_base = OTHER; note = 2'-O-methyl modified nucleotide with thiophosphate linkage
  modified_base 2: mod_base = OTHER; note = 2'-fluoro modified nucleotide with thiophosphate linkage
  modified_base 3: mod_base = OTHER; note = 2'-O-methyl modified nucleotide
  modified_base 4: mod_base = OTHER; note = 2'-O-methyl modified nucleotide
  modified_base 5: mod_base = OTHER; note = 2'-O-methyl modified nucleotide
  modified_base 6: mod_base = OTHER; note = 2'-O-methyl modified nucleotide
  modified_base 7: mod_base = OTHER; note = 2'-fluoro modified nucleotide
  modified_base 8: mod_base = OTHER; note = 2'-O-methyl modified nucleotide
  modified_base 9: mod_base = OTHER; note = 2'-O-methyl modified nucleotide
  modified_base 10: mod_base = OTHER; note = 2'-O-methyl modified nucleotide
  modified_base 11: mod_base = OTHER; note = 2'-O-methyl modified nucleotide
  modified_base 12: mod_base = OTHER; note = 2'-fluoro modified nucleotide
  modified_base 13: mod_base = OTHER; note = 2'-O-methyl modified nucleotide
  modified_base 14: mod_base = OTHER; note = 2'-fluoro modified nucleotide
  modified_base 15: mod_base = OTHER; note = 2'-O-methyl modified nucleotide
  modified_base 16: mod_base = OTHER; note = 2'-fluoro modified nucleotide
  modified_base 17: mod_base = OTHER; note = 2'-O-methyl modified nucleotide
  modified_base 18: mod_base = OTHER; note = 2'-O-methyl modified nucleotide
  modified_base 19: mod_base = OTHER; note = 2'-O-methyl modified nucleotide with thiophosphate linkage
  modified_base 20: mod_base = OTHER; note = 2'-O-methyl modified nucleotide with thiophosphate linkage
  modified_base 21: mod_base = OTHER; note = 2'-O-methyl modified nucleotide
gtatgtgcctcgataactctc

SEQ ID NO: 798 - RNA, 21 nt, synthetic construct
  source 1..21: mol_type = other RNA
  modified_base 1: mod_base = OTHER; note = 2'-O-methyl modified nucleotide with thiophosphate linkage
  modified_base 2: mod_base = OTHER; note = 2'-fluoro modified nucleotide with thiophosphate linkage
  modified_base 3: mod_base = OTHER; note = 2'-O-methyl modified nucleotide
  modified_base 4: mod_base = OTHER; note = 2'-O-methyl modified nucleotide
  modified_base 5: mod_base = OTHER; note = 2'-O-methyl modified nucleotide
  modified_base 6: mod_base = OTHER; note = 2'-O-methyl modified nucleotide
  modified_base 7: mod_base = OTHER; note = 2'-fluoro modified nucleotide
  modified_base 8: mod_base = OTHER; note = 2'-O-methyl modified nucleotide
  modified_base 9: mod_base = OTHER; note = 2'-O-methyl modified nucleotide
  modified_base 10: mod_base = OTHER; note = 2'-O-methyl modified nucleotide
  modified_base 11: mod_base = OTHER; note = 2'-O-methyl modified nucleotide
  modified_base 12: mod_base = OTHER; note = 2'-fluoro modified nucleotide
  modified_base 13: mod_base = OTHER; note = 2'-O-methyl modified nucleotide
  modified_base 14: mod_base = OTHER; note = 2'-fluoro modified nucleotide
  modified_base 15: mod_base = OTHER; note = 2'-O-methyl modified nucleotide
  modified_base 16: mod_base = OTHER; note = 2'-fluoro modified nucleotide
  modified_base 17: mod_base = OTHER; note = 2'-O-methyl modified nucleotide
  modified_base 18: mod_base = OTHER; note = 2'-O-methyl modified nucleotide
  modified_base 19: mod_base = OTHER; note = 2'-O-methyl modified nucleotide with thiophosphate linkage
  modified_base 20: mod_base = OTHER; note = 2'-O-methyl modified nucleotide with thiophosphate linkage
  modified_base 21: mod_base = OTHER; note = 2'-O-methyl modified nucleotide
ctatgtgcctcgataactctc

SEQ ID NO: 799 - RNA, 17 nt, synthetic construct
  source 1..17: mol_type = other RNA
  modified_base 1: mod_base = OTHER; note = 2'-O-methyl modified nucleotide with thiophosphate linkage
  modified_base 2: mod_base = OTHER; note = 2'-fluoro modified nucleotide with thiophosphate linkage
  modified_base 3: mod_base = OTHER; note = 2'-O-methyl modified nucleotide
  modified_base 4: mod_base = OTHER; note = 2'-O-methyl modified nucleotide
  modified_base 5: mod_base = OTHER; note = 2'-O-methyl modified nucleotide
  modified_base 6: mod_base = OTHER; note = 2'-O-methyl modified nucleotide
  modified_base 7: mod_base = OTHER; note = 2'-fluoro modified nucleotide
  modified_base 8: mod_base = OTHER; note = 2'-O-methyl modified nucleotide
  modified_base 9: mod_base = OTHER; note = 2'-O-methyl modified nucleotide
  modified_base 10: mod_base = OTHER; note = 2'-O-methyl modified nucleotide
  modified_base 11: mod_base = OTHER; note = 2'-O-methyl modified nucleotide
  modified_base 12: mod_base = OTHER; note = 2'-fluoro modified nucleotide
  modified_base 13: mod_base = OTHER; note = 2'-O-methyl modified nucleotide
  modified_base 14: mod_base = OTHER; note = 2'-fluoro modified nucleotide
  modified_base 15: mod_base = OTHER; note = 2'-O-methyl modified nucleotide with thiophosphate linkage
  modified_base 16: mod_base = OTHER; note = 2'-fluoro modified nucleotide with thiophosphate linkage
  modified_base 17: mod_base = OTHER; note = 2'-O-methyl modified nucleotide
ttatgtgcctcgataac

SEQ ID NO: 800 - RNA, 18 nt, synthetic construct
  source 1..18: mol_type = other RNA
  modified_base 1: mod_base = OTHER; note = 2'-O-methyl modified nucleotide with thiophosphate linkage
  modified_base 2: mod_base = OTHER; note = 2'-fluoro modified nucleotide with thiophosphate linkage
  modified_base 3: mod_base = OTHER; note = 2'-O-methyl modified nucleotide
  modified_base 4: mod_base = OTHER; note = 2'-O-methyl modified nucleotide
  modified_base 5: mod_base = OTHER; note = 2'-O-methyl modified nucleotide
  modified_base 6: mod_base = OTHER; note = 2'-O-methyl modified nucleotide
  modified_base 7: mod_base = OTHER; note = 2'-fluoro modified nucleotide
  modified_base 8: mod_base = OTHER; note = 2'-O-methyl modified nucleotide
  modified_base 9: mod_base = OTHER; note = 2'-O-methyl modified nucleotide
  modified_base 10: mod_base = OTHER; note = 2'-O-methyl modified nucleotide
  modified_base 11: mod_base = OTHER; note = 2'-O-methyl modified nucleotide
  modified_base 12: mod_base = OTHER; note = 2'-fluoro modified nucleotide
  modified_base 13: mod_base = OTHER; note = 2'-O-methyl modified nucleotide
  modified_base 14: mod_base = OTHER; note = 2'-fluoro modified nucleotide
  modified_base 15: mod_base = OTHER; note = 2'-O-methyl modified nucleotide
  modified_base 16: mod_base = OTHER; note = 2'-fluoro modified nucleotide with thiophosphate linkage
  modified_base 17: mod_base = OTHER; note = 2'-O-methyl modified nucleotide with thiophosphate linkage
  modified_base 18: mod_base = OTHER; note = 2'-O-methyl modified nucleotide
ttatgtgcctcgataact

SEQ ID NO: 801 - RNA, 19 nt, synthetic construct
  source 1..19: mol_type = other RNA
  modified_base 1: mod_base = OTHER; note = 2'-O-methyl modified nucleotide with thiophosphate linkage
  modified_base 2: mod_base = OTHER; note = 2'-fluoro modified nucleotide with thiophosphate linkage
  modified_base 3: mod_base = OTHER; note = 2'-O-methyl modified nucleotide
  modified_base 4: mod_base = OTHER; note = 2'-O-methyl modified nucleotide
  modified_base 5: mod_base = OTHER; note = 2'-O-methyl modified nucleotide
  modified_base 6: mod_base = OTHER; note = 2'-O-methyl modified nucleotide
  modified_base 7: mod_base = OTHER; note = 2'-fluoro modified nucleotide
  modified_base 8: mod_base = OTHER; note = 2'-O-methyl modified nucleotide
  modified_base 9: mod_base = OTHER; note = 2'-O-methyl modified nucleotide
  modified_base 10: mod_base = OTHER; note = 2'-O-methyl modified nucleotide
  modified_base 11: mod_base = OTHER; note = 2'-O-methyl modified nucleotide
  modified_base 12: mod_base = OTHER; note = 2'-fluoro modified nucleotide
  modified_base 13: mod_base = OTHER; note = 2'-O-methyl modified nucleotide
  modified_base 14: mod_base = OTHER; note = 2'-fluoro modified nucleotide
  modified_base 15: mod_base = OTHER; note = 2'-O-methyl modified nucleotide
  modified_base 16: mod_base = OTHER; note = 2'-fluoro modified nucleotide
  modified_base 17: mod_base = OTHER; note = 2'-O-methyl modified nucleotide with thiophosphate linkage
  modified_base 18: mod_base = OTHER; note = 2'-O-methyl modified nucleotide with thiophosphate linkage
  modified_base 19: mod_base = OTHER; note = 2'-O-methyl modified nucleotide
ttatgtgcctcgataactt

SEQ ID NO: 802 - RNA, 19 nt, synthetic construct
  source 1..19: mol_type = other RNA
  modified_base 1: mod_base = OTHER; note = 2'-O-methyl modified nucleotide with thiophosphate linkage
  modified_base 2: mod_base = OTHER; note = 2'-fluoro modified nucleotide with thiophosphate linkage
  modified_base 3: mod_base = OTHER; note = 2'-O-methyl modified nucleotide
  modified_base 4: mod_base = OTHER; note = 2'-O-methyl modified nucleotide
  modified_base 5: mod_base = OTHER; note = 2'-O-methyl modified nucleotide
  modified_base 6: mod_base = OTHER; note = 2'-O-methyl modified nucleotide
  modified_base 7: mod_base = OTHER; note = 2'-fluoro modified nucleotide
  modified_base 8: mod_base = OTHER; note = 2'-O-methyl modified nucleotide
  modified_base 9: mod_base = OTHER; note = 2'-O-methyl modified nucleotide
  modified_base 10: mod_base = OTHER; note = 2'-O-methyl modified nucleotide
  modified_base 11: mod_base = OTHER; note = 2'-O-methyl modified nucleotide
  modified_base 12: mod_base = OTHER; note = 2'-fluoro modified nucleotide
  modified_base 13: mod_base = OTHER; note = 2'-O-methyl modified nucleotide
  modified_base 14: mod_base = OTHER; note = 2'-fluoro modified nucleotide
  modified_base 15: mod_base = OTHER; note = 2'-O-methyl modified nucleotide
  modified_base 16: mod_base = OTHER; note = 2'-fluoro modified nucleotide
  modified_base 17: mod_base = OTHER; note = 2'-O-methyl modified nucleotide with thiophosphate linkage
  modified_base 18: mod_base = OTHER; note = 2'-O-methyl modified nucleotide with thiophosphate linkage
  modified_base 19: mod_base = OTHER; note = 2'-O-methyl modified nucleotide
ttatgtgcctcgataacta

SEQ ID NO: 803 - RNA, 19 nt, synthetic construct
  source 1..19: mol_type = other RNA
  modified_base 1: mod_base = OTHER; note = 2'-O-methyl modified nucleotide with thiophosphate linkage
  modified_base 2: mod_base = OTHER; note = 2'-fluoro modified nucleotide with thiophosphate linkage
  modified_base 3: mod_base = OTHER; note = 2'-O-methyl modified nucleotide
  modified_base 4: mod_base = OTHER; note = 2'-O-methyl modified nucleotide
  modified_base 5: mod_base = OTHER; note = 2'-O-methyl modified nucleotide
  modified_base 6: mod_base = OTHER; note = 2'-O-methyl modified nucleotide
  modified_base 7: mod_base = OTHER; note = 2'-fluoro modified nucleotide
  modified_base 8: mod_base = OTHER; note = 2'-O-methyl modified nucleotide
  modified_base 9: mod_base = OTHER; note = 2'-O-methyl modified nucleotide
  modified_base 10: mod_base = OTHER; note = 2'-O-methyl modified nucleotide
  modified_base 11: mod_base = OTHER; note = 2'-O-methyl modified nucleotide
  modified_base 12: mod_base = OTHER; note = 2'-fluoro modified nucleotide
  modified_base 13: mod_base = OTHER; note = 2'-O-methyl modified nucleotide
  modified_base 14: mod_base = OTHER; note = 2'-fluoro modified nucleotide
  modified_base 15: mod_base = OTHER; note = 2'-O-methyl modified nucleotide
  modified_base 16: mod_base = OTHER; note = 2'-fluoro modified nucleotide
  modified_base 17: mod_base = OTHER; note = 2'-O-methyl modified nucleotide with thiophosphate linkage
  modified_base 18: mod_base = OTHER; note = 2'-O-methyl modified nucleotide with thiophosphate linkage
  modified_base 19: mod_base = OTHER; note = 2'-O-methyl modified nucleotide
ttatgtgcctcgataactc

SEQ ID NO: 804 - RNA, 19 nt, synthetic construct
  source 1..19: mol_type = other RNA
  modified_base 1: mod_base = OTHER; note = 2'-O-methyl modified nucleotide with thiophosphate linkage
  modified_base 2: mod_base = OTHER; note = 2'-fluoro modified nucleotide with thiophosphate linkage
  modified_base 3: mod_base = OTHER; note = 2'-O-methyl modified nucleotide
  modified_base 4: mod_base = OTHER; note = 2'-O-methyl modified nucleotide
  modified_base 5: mod_base = OTHER; note = 2'-O-methyl modified nucleotide
  modified_base 6: mod_base = OTHER; note = 2'-O-methyl modified nucleotide
  modified_base 7: mod_base = OTHER; note = 2'-fluoro modified nucleotide
  modified_base 8: mod_base = OTHER; note = 2'-O-methyl modified nucleotide
  modified_base 9: mod_base = OTHER; note = 2'-O-methyl modified nucleotide
  modified_base 10: mod_base = OTHER; note = 2'-O-methyl modified nucleotide
  modified_base 11: mod_base = OTHER; note = 2'-O-methyl modified nucleotide
  modified_base 12: mod_base = OTHER; note = 2'-fluoro modified nucleotide
  modified_base 13: mod_base = OTHER; note = 2'-O-methyl modified nucleotide
  modified_base 14: mod_base = OTHER; note = 2'-fluoro modified nucleotide
  modified_base 15: mod_base = OTHER; note = 2'-O-methyl modified nucleotide
  modified_base 16: mod_base = OTHER; note = 2'-fluoro modified nucleotide
  modified_base 17: mod_base = OTHER; note = 2'-O-methyl modified nucleotide with thiophosphate linkage
  modified_base 18: mod_base = OTHER; note = 2'-O-methyl modified nucleotide with thiophosphate linkage
  modified_base 19: mod_base = OTHER; note = 2'-O-methyl modified nucleotide
ttatgtgcctcgataactg

SEQ ID NO: 805 - RNA, 20 nt, synthetic construct
  source 1..20: mol_type = other RNA
  modified_base 1: mod_base = OTHER; note = 2'-O-methyl modified nucleotide with thiophosphate linkage
  modified_base 2: mod_base = OTHER; note = 2'-fluoro modified nucleotide with thiophosphate linkage
  modified_base 3: mod_base = OTHER; note = 2'-O-methyl modified nucleotide
  modified_base 4: mod_base = OTHER; note = 2'-O-methyl modified nucleotide
  modified_base 5: mod_base = OTHER; note = 2'-O-methyl modified nucleotide
  modified_base 6: mod_base = OTHER; note = 2'-O-methyl modified nucleotide
  modified_base 7: mod_base = OTHER; note = 2'-fluoro modified nucleotide
  modified_base 8: mod_base = OTHER; note = 2'-O-methyl modified nucleotide
  modified_base 9: mod_base = OTHER; note = 2'-O-methyl modified nucleotide
  modified_base 10: mod_base = OTHER; note = 2'-O-methyl modified nucleotide
  modified_base 11: mod_base = OTHER; note = 2'-O-methyl modified nucleotide
  modified_base 12: mod_base = OTHER; note = 2'-fluoro modified nucleotide
  modified_base 13: mod_base = OTHER; note = 2'-O-methyl modified nucleotide
  modified_base 14: mod_base = OTHER; note = 2'-fluoro modified nucleotide
  modified_base 15: mod_base = OTHER; note = 2'-O-methyl modified nucleotide
  modified_base 16: mod_base = OTHER; note = 2'-fluoro modified nucleotide
  modified_base 17: mod_base = OTHER; note = 2'-O-methyl modified nucleotide
  modified_base 18: mod_base = OTHER; note = 2'-O-methyl modified nucleotide with thiophosphate linkage
  modified_base 19: mod_base = OTHER; note = 2'-O-methyl modified nucleotide with thiophosphate linkage
  modified_base 20: mod_base = OTHER; note = 2'-O-methyl modified nucleotide
ttatgtgcctcgataactct

SEQ ID NO: 806 - RNA, 20 nt, synthetic construct
  source 1..20: mol_type = other RNA
  modified_base 1: mod_base = OTHER; note = 2'-O-methyl modified nucleotide with thiophosphate linkage
  modified_base 2: mod_base = OTHER; note = 2'-fluoro modified nucleotide with thiophosphate linkage
  modified_base 3: mod_base = OTHER; note = 2'-O-methyl modified nucleotide
  modified_base 4: mod_base = OTHER; note = 2'-O-methyl modified nucleotide
  modified_base 5: mod_base = OTHER; note = 2'-O-methyl modified nucleotide
  modified_base 6: mod_base = OTHER; note = 2'-O-methyl modified nucleotide
  modified_base 7: mod_base = OTHER; note = 2'-fluoro modified nucleotide
  modified_base 8: mod_base = OTHER; note = 2'-O-methyl modified nucleotide
  modified_base 9: mod_base = OTHER; note = 2'-O-methyl modified nucleotide
  modified_base 10: mod_base = OTHER; note = 2'-O-methyl modified nucleotide
  modified_base 11: mod_base = OTHER; note = 2'-O-methyl modified nucleotide
  modified_base 12: mod_base = OTHER; note = 2'-fluoro modified nucleotide
  modified_base 13: mod_base = OTHER; note = 2'-O-methyl modified nucleotide
  modified_base 14: mod_base = OTHER; note = 2'-fluoro modified nucleotide
  modified_base 15: mod_base = OTHER; note = 2'-O-methyl modified nucleotide
  modified_base 16: mod_base = OTHER; note = 2'-fluoro modified nucleotide
  modified_base 17: mod_base = OTHER; note = 2'-O-methyl modified nucleotide
  modified_base 18: mod_base = OTHER; note = 2'-O-methyl modified nucleotide with thiophosphate linkage
  modified_base 19: mod_base = OTHER; note = 2'-O-methyl modified nucleotide with thiophosphate linkage
  modified_base 20: mod_base = OTHER; note = 2'-O-methyl modified nucleotide
ttatgtgcctcgataactca

SEQ ID NO: 807 - RNA, 20 nt, synthetic construct
  source 1..20: mol_type = other RNA
  modified_base 1: mod_base = OTHER; note = 2'-O-methyl modified nucleotide with thiophosphate linkage
  modified_base 2: mod_base = OTHER; note = 2'-fluoro modified nucleotide with thiophosphate linkage
  modified_base 3: mod_base = OTHER; note = 2'-O-methyl modified nucleotide
  modified_base 4: mod_base = OTHER; note = 2'-O-methyl modified nucleotide
  modified_base 5: mod_base = OTHER; note = 2'-O-methyl modified nucleotide
  modified_base 6: mod_base = OTHER; note = 2'-O-methyl modified nucleotide
  modified_base 7: mod_base = OTHER; note = 2'-fluoro modified nucleotide
  modified_base 8: mod_base = OTHER; note = 2'-O-methyl modified nucleotide
  modified_base 9: mod_base = OTHER; note = 2'-O-methyl modified nucleotide
  modified_base 10: mod_base = OTHER; note = 2'-O-methyl modified nucleotide
  modified_base 11: mod_base = OTHER; note = 2'-O-methyl modified nucleotide
  modified_base 12: mod_base = OTHER; note = 2'-fluoro modified nucleotide
  modified_base 13: mod_base = OTHER; note = 2'-O-methyl modified nucleotide
  modified_base 14: mod_base = OTHER; note = 2'-fluoro modified nucleotide
  modified_base 15: mod_base = OTHER; note = 2'-O-methyl modified nucleotide
  modified_base 16: mod_base = OTHER; note = 2'-fluoro modified nucleotide
  modified_base 17: mod_base = OTHER; note = 2'-O-methyl modified nucleotide
  modified_base 18: mod_base = OTHER; note = 2'-O-methyl modified nucleotide with thiophosphate linkage
  modified_base 19: mod_base = OTHER; note = 2'-O-methyl modified nucleotide with thiophosphate linkage
  modified_base 20: mod_base = OTHER; note = 2'-O-methyl modified nucleotide
ttatgtgcctcgataactcc

SEQ ID NO: 808 - RNA, 20 nt, synthetic construct
  source 1..20: mol_type = other RNA
  modified_base 1: mod_base = OTHER; note = 2'-O-methyl modified nucleotide with thiophosphate linkage
  modified_base 2: mod_base = OTHER; note = 2'-fluoro modified nucleotide with thiophosphate linkage
  modified_base 3: mod_base = OTHER; note = 2'-O-methyl modified nucleotide
  modified_base 4: mod_base = OTHER; note = 2'-O-methyl modified nucleotide
  modified_base 5: mod_base = OTHER; note = 2'-O-methyl modified nucleotide
  modified_base 6: mod_base = OTHER; note = 2'-O-methyl modified nucleotide
  modified_base 7: mod_base = OTHER; note = 2'-fluoro modified nucleotide
  modified_base 8: mod_base = OTHER; note = 2'-O-methyl modified nucleotide
  modified_base 9: mod_base = OTHER; note = 2'-O-methyl modified nucleotide
  modified_base 10: mod_base = OTHER; note = 2'-O-methyl modified nucleotide
  modified_base 11: mod_base = OTHER; note = 2'-O-methyl modified nucleotide
  modified_base 12: mod_base = OTHER; note = 2'-fluoro modified nucleotide
  modified_base 13: mod_base = OTHER; note = 2'-O-methyl modified nucleotide
  modified_base 14: mod_base = OTHER; note = 2'-fluoro modified nucleotide
  modified_base 15: mod_base = OTHER; note = 2'-O-methyl modified nucleotide
  modified_base 16: mod_base = OTHER; note = 2'-fluoro modified nucleotide
  modified_base 17: mod_base = OTHER; note = 2'-O-methyl modified nucleotide
  modified_base 18: mod_base = OTHER; note = 2'-O-methyl modified nucleotide with thiophosphate linkage
  modified_base 19: mod_base = OTHER; note = 2'-O-methyl modified nucleotide with thiophosphate linkage
  modified_base 20: mod_base = OTHER; note = 2'-O-methyl modified nucleotide
ttatgtgcctcgataactcg

SEQ ID NO: 809 - RNA, 21 nt, synthetic construct
  source 1..21: mol_type = other RNA
  modified_base 1: mod_base = OTHER; note = 2'-O-methyl modified nucleotide with thiophosphate linkage
  modified_base 2: mod_base = OTHER; note = 2'-fluoro modified nucleotide with thiophosphate linkage
  modified_base 3: mod_base = OTHER; note = 2'-O-methyl modified nucleotide
  modified_base 4: mod_base = OTHER; note = 2'-O-methyl modified nucleotide
  modified_base 5: mod_base = OTHER; note = 2'-O-methyl modified nucleotide
  modified_base 6: mod_base = OTHER; note = 2'-O-methyl modified nucleotide
  modified_base 7: mod_base = OTHER; note = 2'-fluoro modified nucleotide
  modified_base 8: mod_base = OTHER; note = 2'-O-methyl modified nucleotide
  modified_base 9: mod_base = OTHER; note = 2'-O-methyl modified nucleotide
  modified_base 10: mod_base = OTHER; note = 2'-O-methyl modified nucleotide
  modified_base 11: mod_base = OTHER; note = 2'-O-methyl modified nucleotide
  modified_base 12: mod_base = OTHER; note = 2'-fluoro modified nucleotide
  modified_base 13: mod_base = OTHER; note = 2'-O-methyl modified nucleotide
  modified_base 14: mod_base = OTHER; note = 2'-fluoro modified nucleotide
  modified_base 15: mod_base = OTHER; note = 2'-O-methyl modified nucleotide
  modified_base 16: mod_base = OTHER; note = 2'-fluoro modified nucleotide
  modified_base 17: mod_base = OTHER; note = 2'-O-methyl modified nucleotide
  modified_base 18: mod_base = OTHER; note = 2'-O-methyl modified nucleotide
  modified_base 19: mod_base = OTHER; note = 2'-O-methyl modified nucleotide with thiophosphate linkage
  modified_base 20: mod_base = OTHER; note = 2'-O-methyl modified nucleotide with thiophosphate linkage
  modified_base 21: mod_base = OTHER; note = 2'-O-methyl modified nucleotide
ttatgtgcctcgataactcta

SEQ ID NO: 810 - RNA, 21 nt, synthetic construct
  source 1..21: mol_type = other RNA
  modified_base 1: mod_base = OTHER; note = 2'-O-methyl modified nucleotide with thiophosphate linkage
  modified_base 2: mod_base = OTHER; note = 2'-fluoro modified nucleotide with thiophosphate linkage
  modified_base 3: mod_base = OTHER; note = 2'-O-methyl modified nucleotide
  modified_base 4: mod_base = OTHER; note = 2'-O-methyl modified nucleotide
  modified_base 5: mod_base = OTHER; note = 2'-O-methyl modified nucleotide
  modified_base 6: mod_base = OTHER; note = 2'-O-methyl modified nucleotide
  modified_base 7: mod_base = OTHER; note = 2'-fluoro modified nucleotide
  modified_base 8: mod_base = OTHER; note = 2'-O-methyl modified nucleotide
  modified_base 9: mod_base = OTHER; note = 2'-O-methyl modified nucleotide
  modified_base 10: mod_base = OTHER; note = 2'-O-methyl modified nucleotide
  modified_base 11: mod_base = OTHER; note = 2'-O-methyl modified nucleotide
  modified_base 12: mod_base = OTHER; note = 2'-fluoro modified nucleotide
  modified_base 13: mod_base = OTHER; note = 2'-O-methyl modified nucleotide
  modified_base 14: mod_base = OTHER; note = 2'-fluoro modified nucleotide
  modified_base 15: mod_base = OTHER; note = 2'-O-methyl modified nucleotide
  modified_base 16: mod_base = OTHER; note = 2'-fluoro modified nucleotide
  modified_base 17: mod_base = OTHER; note = 2'-O-methyl modified nucleotide
  modified_base 18: mod_base = OTHER; note = 2'-O-methyl modified nucleotide
  modified_base 19: mod_base = OTHER; note = 2'-O-methyl modified nucleotide with thiophosphate linkage
  modified_base 20: mod_base = OTHER; note = 2'-O-methyl modified nucleotide with thiophosphate linkage
  modified_base 21: mod_base = OTHER; note = 2'-O-methyl modified nucleotide
ttatgtgcctcgataactctg

SEQ ID NO: 811 - RNA, 21 nt, synthetic construct
  source 1..21: mol_type = other RNA
  modified_base 1: mod_base = OTHER; note = 2'-O-methyl modified nucleotide with thiophosphate linkage
  modified_base 2: mod_base = OTHER; note = 2'-fluoro modified nucleotide with thiophosphate linkage
  modified_base 3: mod_base = OTHER; note = 2'-O-methyl modified nucleotide
  modified_base 4: mod_base = OTHER; note = 2'-O-methyl modified nucleotide
  modified_base 5: mod_base = OTHER; note = 2'-O-methyl modified nucleotide
  modified_base 6: mod_base = OTHER; note = 2'-O-methyl modified nucleotide
  modified_base 7: mod_base = OTHER; note = 2'-fluoro modified nucleotide
  modified_base 8: mod_base = OTHER; note = 2'-O-methyl modified nucleotide
  modified_base 9: mod_base = OTHER; note = 2'-O-methyl modified nucleotide
  modified_base 10: mod_base = OTHER; note = 2'-O-methyl modified nucleotide
  modified_base 11: mod_base = OTHER; note = 2'-O-methyl modified nucleotide
  modified_base 12: mod_base = OTHER; note = 2'-fluoro modified nucleotide
  modified_base 13: mod_base = OTHER; note = 2'-O-methyl modified nucleotide
  modified_base 14: mod_base = OTHER; note = 2'-fluoro modified nucleotide
  modified_base 15: mod_base = OTHER; note = 2'-O-methyl modified nucleotide
  modified_base 16: mod_base = OTHER; note = 2'-fluoro modified nucleotide
  modified_base 17: mod_base = OTHER; note = 2'-O-methyl modified nucleotide
  modified_base 18: mod_base = OTHER; note = 2'-O-methyl modified nucleotide
  modified_base 19: mod_base = OTHER; note = 2'-O-methyl modified nucleotide with thiophosphate linkage
  modified_base 20: mod_base = OTHER; note = 2'-O-methyl modified nucleotide with thiophosphate linkage
  modified_base 21: mod_base = OTHER; note = 2'-O-methyl modified nucleotide
ttatgtgcctcgataactctt

SEQ ID NO: 812 - RNA, 22 nt, synthetic construct
  source 1..22: mol_type = other RNA
  modified_base 1: mod_base = OTHER; note = 2'-O-methyl modified nucleotide with thiophosphate linkage
  modified_base 2: mod_base = OTHER; note = 2'-fluoro modified nucleotide with thiophosphate linkage
  modified_base 3: mod_base = OTHER; note = 2'-O-methyl modified nucleotide
  modified_base 4: mod_base = OTHER; note = 2'-O-methyl modified nucleotide
  modified_base 5: mod_base = OTHER; note = 2'-O-methyl modified nucleotide
  modified_base 6: mod_base = OTHER; note = 2'-O-methyl modified nucleotide
  modified_base 7: mod_base = OTHER; note = 2'-fluoro modified nucleotide
  modified_base 8: mod_base = OTHER; note = 2'-O-methyl modified nucleotide
  modified_base 9: mod_base = OTHER; note = 2'-O-methyl modified nucleotide
  modified_base 10: mod_base = OTHER; note = 2'-O-methyl modified nucleotide
  modified_base 11: mod_base = OTHER; note = 2'-O-methyl modified nucleotide
  modified_base 12: mod_base = OTHER; note = 2'-fluoro modified nucleotide
  modified_base 13: mod_base = OTHER; note = 2'-O-methyl modified nucleotide
  modified_base 14: mod_base = OTHER; note = 2'-fluoro modified nucleotide
  modified_base 15: mod_base = OTHER; note = 2'-O-methyl modified nucleotide
  modified_base 16: mod_base = OTHER; note = 2'-fluoro modified nucleotide
  modified_base 17: mod_base = OTHER; note = 2'-O-methyl modified nucleotide
  modified_base 18: mod_base = OTHER; note = 2'-O-methyl modified nucleotide
  modified_base 19: mod_base = OTHER; note = 2'-O-methyl modified nucleotide
  modified_base 20: mod_base = OTHER; note = 2'-O-methyl modified nucleotide with thiophosphate linkage
  modified_base 21: mod_base = OTHER; note = 2'-O-methyl modified nucleotide with thiophosphate linkage
  modified_base 22: mod_base = OTHER; note = 2'-O-methyl modified nucleotide
ttatgtgcctcgataactctgt

SEQ ID NO: 813 - RNA, 23 nt, synthetic construct
  source 1..23: mol_type = other RNA
  modified_base 1: mod_base = OTHER; note = 2'-O-methyl modified nucleotide with thiophosphate linkage
  modified_base 2: mod_base = OTHER; note = 2'-fluoro modified nucleotide with thiophosphate linkage
  modified_base 3: mod_base = OTHER; note = 2'-O-methyl modified nucleotide
  modified_base 4: mod_base = OTHER; note = 2'-O-methyl modified nucleotide
  modified_base 5: mod_base = OTHER; note = 2'-O-methyl modified nucleotide
  modified_base 6: mod_base = OTHER; note = 2'-O-methyl modified nucleotide
  modified_base 7: mod_base = OTHER; note = 2'-fluoro modified nucleotide
  modified_base 8: mod_base = OTHER; note = 2'-O-methyl modified nucleotide
  modified_base 9: mod_base = OTHER; note = 2'-O-methyl modified nucleotide
  modified_base 10: mod_base = OTHER; note = 2'-O-methyl modified nucleotide
  modified_base 11: mod_base = OTHER; note = 2'-O-methyl modified nucleotide
  modified_base 12: mod_base = OTHER; note = 2'-fluoro modified nucleotide
  modified_base 13: mod_base = OTHER; note = 2'-O-methyl modified nucleotide
  modified_base 14: mod_base = OTHER; note = 2'-fluoro modified nucleotide
  modified_base 15: mod_base = OTHER; note = 2'-O-methyl modified nucleotide
  modified_base 16: mod_base = OTHER; note = 2'-fluoro modified nucleotide
  modified_base 17: mod_base = OTHER; note = 2'-O-methyl modified nucleotide
  modified_base 18: mod_base = OTHER; note = 2'-O-methyl modified nucleotide
  modified_base 19: mod_base = OTHER; note = 2'-O-methyl modified nucleotide
  modified_base 20: mod_base = OTHER; note = 2'-O-methyl modified nucleotide
  modified_base 21: mod_base = OTHER; note = 2'-O-methyl modified nucleotide with thiophosphate linkage
  modified_base 22: mod_base = OTHER; note = 2'-O-methyl modified nucleotide with thiophosphate linkage
  modified_base 23: mod_base = OTHER; note = 2'-O-methyl modified nucleotide
ttatgtgcctcgataactctgtc

SEQ ID NO: 814 - RNA, 24 nt, synthetic construct
  source 1..24: mol_type = other RNA
  modified_base 1: mod_base = OTHER; note = 2'-O-methyl modified nucleotide with thiophosphate linkage
  modified_base 2: mod_base = OTHER; note = 2'-fluoro modified nucleotide with thiophosphate linkage
  modified_base 3: mod_base = OTHER; note = 2'-O-methyl modified nucleotide
  modified_base 4: mod_base = OTHER; note = 2'-O-methyl modified nucleotide
  modified_base 5: mod_base = OTHER; note = 2'-O-methyl modified nucleotide
  modified_base 6: mod_base = OTHER; note = 2'-O-methyl modified nucleotide
  modified_base 7: mod_base = OTHER; note = 2'-fluoro modified nucleotide
  modified_base 8: mod_base = OTHER; note = 2'-O-methyl modified nucleotide
  modified_base 9: mod_base = OTHER; note = 2'-O-methyl modified nucleotide
  modified_base 10: mod_base = OTHER; note = 2'-O-methyl modified nucleotide
  modified_base 11: mod_base = OTHER; note = 2'-O-methyl modified nucleotide
  modified_base 12: mod_base = OTHER; note = 2'-fluoro modified nucleotide
  modified_base 13: mod_base = OTHER; note = 2'-O-methyl modified nucleotide
  modified_base 14: mod_base = OTHER; note = 2'-fluoro modified nucleotide
  modified_base 15: mod_base = OTHER; note = 2'-O-methyl modified nucleotide
  modified_base 16: mod_base = OTHER; note = 2'-fluoro modified nucleotide
  modified_base 17: mod_base = OTHER; note = 2'-O-methyl modified nucleotide
  modified_base 18: mod_base = OTHER; note = 2'-O-methyl modified nucleotide
  modified_base 19: mod_base = OTHER; note = 2'-O-methyl modified nucleotide
  modified_base 20: mod_base = OTHER; note = 2'-O-methyl modified nucleotide
  modified_base 21: mod_base = OTHER; note = 2'-O-methyl modified nucleotide
  modified_base 22: mod_base = OTHER; note = 2'-O-methyl modified nucleotide with thiophosphate linkage
  modified_base 23: mod_base = OTHER; note = 2'-O-methyl modified nucleotide with thiophosphate linkage
  modified_base 24: mod_base = OTHER; note = 2'-O-methyl modified nucleotide
ttatgtgcctcgataactctgtcc

SEQ ID NO: 815 - RNA, 25 nt, synthetic construct
  source 1..25: mol_type = other RNA
  modified_base 1: mod_base = OTHER; note = 2'-O-methyl modified nucleotide with thiophosphate linkage
  modified_base 2: mod_base = OTHER; note = 2'-fluoro modified nucleotide with thiophosphate linkage
  modified_base 3: mod_base = OTHER; note = 2'-O-methyl modified nucleotide
  modified_base 4: mod_base = OTHER; note = 2'-O-methyl modified nucleotide
  modified_base 5: mod_base = OTHER; note = 2'-O-methyl modified nucleotide
  modified_base 6: mod_base = OTHER; note = 2'-O-methyl modified nucleotide
  modified_base 7: mod_base = OTHER; note = 2'-fluoro modified nucleotide
  modified_base 8: mod_base = OTHER; note = 2'-O-methyl modified nucleotide
  modified_base 9: mod_base = OTHER; note = 2'-O-methyl modified nucleotide
  modified_base 10: mod_base = OTHER; note = 2'-O-methyl modified nucleotide
  modified_base 11: mod_base = OTHER; note = 2'-O-methyl modified nucleotide
  modified_base 12: mod_base = OTHER; note = 2'-fluoro modified nucleotide
  modified_base 13: mod_base = OTHER; note = 2'-O-methyl modified nucleotide
  modified_base 14: mod_base = OTHER; note = 2'-fluoro modified nucleotide
  modified_base 15: mod_base = OTHER; note = 2'-O-methyl modified nucleotide
  modified_base 16: mod_base = OTHER; note = 2'-fluoro modified nucleotide
  modified_base 17: mod_base = OTHER; note = 2'-O-methyl modified nucleotide
  modified_base 18: mod_base = OTHER; note = 2'-O-methyl modified nucleotide
  modified_base 19: mod_base = OTHER; note = 2'-O-methyl modified nucleotide
  modified_base 20: mod_base = OTHER; note = 2'-O-methyl modified nucleotide
  modified_base 21: mod_base = OTHER; note = 2'-O-methyl modified nucleotide
  modified_base 22: mod_base = OTHER; note = 2'-O-methyl modified nucleotide
  modified_base 23: mod_base = OTHER; note = 2'-O-methyl modified nucleotide with thiophosphate linkage
  modified_base 24: mod_base = OTHER; note = 2'-O-methyl modified nucleotide with thiophosphate linkage
  modified_base 25: mod_base = OTHER; note = 2'-O-methyl modified nucleotide
ttatgtgcctcgataactctgtcca

SEQ ID NO: 816 - RNA, 26 nt, synthetic construct
  source 1..26: mol_type = other RNA
  modified_base 1: mod_base = OTHER; note = 2'-O-methyl modified nucleotide with thiophosphate linkage
  modified_base 2: mod_base = OTHER; note = 2'-fluoro modified nucleotide with thiophosphate linkage
  modified_base 3: mod_base = OTHER; note = 2'-O-methyl modified nucleotide
  modified_base 4: mod_base = OTHER; note = 2'-O-methyl modified nucleotide
  modified_base 5: mod_base = OTHER; note = 2'-O-methyl modified nucleotide
  modified_base 6: mod_base = OTHER; note = 2'-O-methyl modified nucleotide
  modified_base 7: mod_base = OTHER; note = 2'-fluoro modified nucleotide
  modified_base 8: mod_base = OTHER; note = 2'-O-methyl modified nucleotide
  modified_base 9: mod_base = OTHER; note = 2'-O-methyl modified nucleotide
  modified_base 10: mod_base = OTHER; note = 2'-O-methyl modified nucleotide
  modified_base 11: mod_base = OTHER; note = 2'-O-methyl modified nucleotide
  modified_base 12: mod_base = OTHER; note = 2'-fluoro modified nucleotide
  modified_base 13: mod_base = OTHER; note = 2'-O-methyl modified nucleotide
  modified_base 14: mod_base = OTHER; note = 2'-fluoro modified nucleotide
  modified_base 15: mod_base = OTHER; note = 2'-O-methyl modified nucleotide
  modified_base 16: mod_base = OTHER; note = 2'-fluoro modified nucleotide
  modified_base 17: mod_base = OTHER; note = 2'-O-methyl modified nucleotide
  modified_base 18: mod_base = OTHER; note = 2'-O-methyl modified nucleotide
  modified_base 19: mod_base = OTHER; note = 2'-O-methyl modified nucleotide
  modified_base 20: mod_base = OTHER; note = 2'-O-methyl modified nucleotide
  modified_base 21: mod_base = OTHER; note = 2'-O-methyl modified nucleotide
  modified_base 22: mod_base = OTHER; note = 2'-O-methyl modified nucleotide
  modified_base 23: mod_base = OTHER; note = 2'-O-methyl modified nucleotide
  modified_base 24: mod_base = OTHER; note = 2'-O-methyl modified nucleotide with thiophosphate linkage
  modified_base 25: mod_base = OTHER; note = 2'-O-methyl modified nucleotide with thiophosphate linkage
  modified_base 26: mod_base = OTHER; note = 2'-O-methyl modified nucleotide
ttatgtgcctcgataactctgtccat

SEQ ID NO: 817 - RNA, 32 nt, synthetic construct; identical to SEQ ID NO: 631
  source 1..32: mol_type = other RNA
  modified_base 1: mod_base = OTHER; note = 2'-O-methyl modified nucleotide with thiophosphate linkage
  modified_base 2: mod_base = OTHER; note = 2'-fluoro modified nucleotide with thiophosphate linkage
  modified_base 3: mod_base = OTHER; note = 2'-O-methyl modified nucleotide
  modified_base 4: mod_base = OTHER; note = 2'-O-methyl modified nucleotide
  modified_base 5: mod_base = OTHER; note = 2'-O-methyl modified nucleotide
  modified_base 6: mod_base = OTHER; note = 2'-O-methyl modified nucleotide
  modified_base 7: mod_base = OTHER; note = 2'-fluoro modified nucleotide
  modified_base 8: mod_base = OTHER; note = 2'-O-methyl modified nucleotide
  modified_base 9: mod_base = OTHER; note = 2'-O-methyl modified nucleotide
  modified_base 10: mod_base = OTHER; note = 2'-O-methyl modified nucleotide
  modified_base 11: mod_base = OTHER; note = 2'-O-methyl modified nucleotide
  modified_base 12: mod_base = OTHER; note = 2'-fluoro modified nucleotide
  modified_base 13: mod_base = OTHER; note = 2'-O-methyl modified nucleotide
  modified_base 14: mod_base = OTHER; note = 2'-fluoro modified nucleotide
  modified_base 15: mod_base = OTHER; note = 2'-O-methyl modified nucleotide
  modified_base 16: mod_base = OTHER; note = 2'-fluoro modified nucleotide
  modified_base 17: mod_base = OTHER; note = 2'-O-methyl modified nucleotide
  modified_base 18: mod_base = OTHER; note = 2'-O-methyl modified nucleotide
  modified_base 19: mod_base = OTHER; note = 2'-O-methyl modified nucleotide
  modified_base 20: mod_base = OTHER; note = 2'-O-methyl modified nucleotide
  modified_base 21: mod_base = OTHER; note = 2'-O-methyl modified nucleotide
  modified_base 22: mod_base = OTHER; note = 2'-O-methyl modified nucleotide
  modified_base 23: mod_base = OTHER; note = 2'-O-methyl modified nucleotide
  modified_base 24: mod_base = OTHER; note = 2'-O-methyl modified nucleotide
  modified_base 25: mod_base = OTHER; note = 2'-O-methyl modified nucleotide
  modified_base 26: mod_base = OTHER; note = 2'-O-methyl modified nucleotide
  modified_base 27: mod_base = OTHER; note = 2'-O-methyl modified nucleotide
  modified_base 28: mod_base = OTHER; note = 2'-O-methyl modified nucleotide
  modified_base 29: mod_base = OTHER; note = 2'-O-methyl modified nucleotide
  modified_base 30: mod_base = OTHER; note = 2'-O-methyl modified nucleotide with thiophosphate linkage
  modified_base 31: mod_base = OTHER; note = 2'-O-methyl modified nucleotide with thiophosphate linkage
  modified_base 32: mod_base = OTHER; note = 2'-O-methyl modified nucleotide

SEQ ID NO: 818 - RNA, 23 nt, synthetic construct
  source 1..23: mol_type = other RNA
  modified_base 1: mod_base = OTHER; note = 2'-O-methyl modified nucleotide with thiophosphate linkage
  modified_base 2: mod_base = OTHER; note = 2'-fluoro modified nucleotide with thiophosphate linkage
  modified_base 3: mod_base = OTHER; note = 2'-O-methyl modified nucleotide
  modified_base 4: mod_base = OTHER; note = 2'-O-methyl modified nucleotide
  modified_base 5: mod_base = OTHER; note = 2'-O-methyl modified nucleotide
  modified_base 6: mod_base = OTHER; note = 2'-O-methyl modified nucleotide
  modified_base 7: mod_base = OTHER; note = 2'-fluoro modified nucleotide
  modified_base 8: mod_base = OTHER; note = 2'-O-methyl modified nucleotide
  modified_base 9: mod_base = OTHER; note = 2'-O-methyl modified nucleotide
  modified_base 10: mod_base = OTHER; note = 2'-O-methyl modified nucleotide
  modified_base 11: mod_base = OTHER; note = 2'-O-methyl modified nucleotide
  modified_base 12: mod_base = OTHER; note = 2'-fluoro modified nucleotide
  modified_base 13: mod_base = OTHER; note = 2'-O-methyl modified nucleotide
  modified_base 14: mod_base = OTHER; note = 2'-fluoro modified nucleotide
  modified_base 15: mod_base = OTHER; note = 2'-O-methyl modified nucleotide
  modified_base 16: mod_base = OTHER; note = 2'-fluoro modified nucleotide
  modified_base 17: mod_base = OTHER; note = 2'-O-methyl modified nucleotide
  modified_base 18: mod_base = OTHER; note = 2'-O-methyl modified nucleotide
  modified_base 19: mod_base = OTHER; note = 2'-O-methyl modified nucleotide
  modified_base 20: mod_base = OTHER; note = 2'-O-methyl modified nucleotide
  modified_base 21: mod_base = OTHER; note = 2'-O-methyl modified nucleotide with thiophosphate linkage
  modified_base 22: mod_base = OTHER; note = 2'-O-methyl modified nucleotide with thiophosphate linkage
  modified_base 23: mod_base = OTHER; note = 2'-O-methyl modified nucleotide
ttatgtgcctcgataactctctt

SEQ ID NO: 819 - RNA, 23 nt, synthetic construct
  source 1..23: mol_type = other RNA
  modified_base 1: mod_base = OTHER; note = 2'-O-methyl modified nucleotide with thiophosphate linkage
  modified_base 2: mod_base = OTHER; note = 2'-fluoro modified nucleotide with thiophosphate linkage
  modified_base 3: mod_base = OTHER; note = 2'-O-methyl modified nucleotide
  modified_base 4: mod_base = OTHER; note = 2'-O-methyl modified nucleotide
  modified_base 5: mod_base = OTHER; note = 2'-O-methyl modified nucleotide
  modified_base 6: mod_base = OTHER; note = 2'-O-methyl modified nucleotide
  modified_base 7: mod_base = OTHER; note = 2'-fluoro modified nucleotide
  modified_base 8: mod_base = OTHER; note = 2'-O-methyl modified nucleotide
  modified_base 9: mod_base = OTHER; note = 2'-O-methyl modified nucleotide
  modified_base 10: mod_base = OTHER; note = 2'-O-methyl modified nucleotide
  modified_base 11: mod_base = OTHER; note = 2'-O-methyl modified nucleotide
  modified_base 12: mod_base = OTHER; note = 2'-fluoro modified nucleotide
  modified_base 13: mod_base = OTHER; note = 2'-O-methyl modified nucleotide
  modified_base 14: mod_base = OTHER; note = 2'-fluoro modified nucleotide
  modified_base 15: mod_base = OTHER; note = 2'-O-methyl modified nucleotide
  modified_base 16: mod_base = OTHER; note = 2'-fluoro modified nucleotide
  modified_base 17: mod_base = OTHER; note = 2'-O-methyl modified nucleotide
  modified_base 18: mod_base = OTHER; note = 2'-O-methyl modified nucleotide
  modified_base 19: mod_base = OTHER; note = 2'-O-methyl modified nucleotide
  modified_base 20: mod_base = OTHER; note = 2'-O-methyl modified nucleotide
  modified_base 21: mod_base = OTHER; note = 2'-O-methyl modified nucleotide with thiophosphate linkage
  modified_base 22: mod_base = OTHER; note = 2'-O-methyl modified nucleotide with thiophosphate linkage
  modified_base 23: mod_base = OTHER; note = 2'-O-methyl modified nucleotide
ttatgtgcctcgataactctcga

SEQ ID NO: 820 - RNA, 21 nt, synthetic construct
  source 1..21: mol_type = other RNA
  modified_base 1: mod_base = OTHER; note = 2'-O-methyl modified nucleotide with thiophosphate linkage
  modified_base 2: mod_base = OTHER; note = 2'-fluoro modified nucleotide with thiophosphate linkage
  modified_base 3: mod_base = OTHER; note = 2'-O-methyl modified nucleotide
  modified_base 4: mod_base = OTHER; note = 2'-O-methyl modified nucleotide
  modified_base 5: mod_base = OTHER; note = 2'-O-methyl modified nucleotide
  modified_base 6: mod_base = OTHER; note = Unlocked nucleic acid
  modified_base 7: mod_base = OTHER; note = 2'-fluoro modified nucleotide
  modified_base 8: mod_base = OTHER; note = 2'-O-methyl modified nucleotide
  modified_base 9: mod_base = OTHER; note = 2'-O-methyl modified nucleotide
  modified_base 10: mod_base = OTHER; note = 2'-O-methyl modified nucleotide
  modified_base 11: mod_base = OTHER; note = 2'-O-methyl modified nucleotide
  modified_base 12: mod_base = OTHER; note = 2'-fluoro modified nucleotide
  modified_base 13: mod_base = OTHER; note = 2'-O-methyl modified nucleotide
  modified_base 14: mod_base = OTHER; note = 2'-fluoro modified nucleotide
  modified_base 15: mod_base = OTHER; note = 2'-O-methyl modified nucleotide
  modified_base 16: mod_base = OTHER; note = 2'-fluoro modified nucleotide
  modified_base 17: mod_base = OTHER; note = 2'-O-methyl modified nucleotide
  modified_base 18: mod_base = OTHER; note = 2'-O-methyl modified nucleotide
  modified_base 19: mod_base = OTHER; note = 2'-O-methyl modified nucleotide with thiophosphate linkage
  modified_base 20: mod_base = OTHER; note = 2'-O-methyl modified nucleotide with thiophosphate linkage
  modified_base 21: mod_base = OTHER; note = 2'-O-methyl modified nucleotide
ttatgtgcctcgataactctc

SEQ ID NO: 821 - RNA, 21 nt, synthetic construct
  source 1..21: mol_type = other RNA
  modified_base 1: mod_base = OTHER; note = 2'-O-methyl modified nucleotide with thiophosphate linkage
  modified_base 2: mod_base = OTHER; note = 2'-fluoro modified nucleotide with thiophosphate linkage
  modified_base 3: mod_base = OTHER; note = 2'-O-methyl modified nucleotide
  modified_base 4: mod_base = OTHER; note = 2'-O-methyl modified nucleotide
  modified_base 5: mod_base = OTHER; note = 2'-O-methyl modified nucleotide
  modified_base 6: mod_base = OTHER; note = 2'-O-methyl modified nucleotide
  modified_base 7: mod_base = OTHER; note = Unlocked nucleic acid
  modified_base 8: mod_base = OTHER; note = 2'-O-methyl modified nucleotide
  modified_base 9: mod_base = OTHER; note = 2'-O-methyl modified nucleotide
  modified_base 10: mod_base = OTHER; note = 2'-O-methyl modified nucleotide
  modified_base 11: mod_base = OTHER; note = 2'-O-methyl modified nucleotide
  modified_base 12: mod_base = OTHER; note = 2'-fluoro modified nucleotide
  modified_base 13: mod_base = OTHER; note = 2'-O-methyl modified nucleotide
  modified_base 14: mod_base = OTHER; note = 2'-fluoro modified nucleotide
  modified_base 15: mod_base = OTHER; note = 2'-O-methyl modified nucleotide
  modified_base 16: mod_base = OTHER; note = 2'-fluoro modified nucleotide
  modified_base 17: mod_base = OTHER; note = 2'-O-methyl modified nucleotide
  modified_base 18: mod_base = OTHER; note = 2'-O-methyl modified nucleotide
  modified_base 19: mod_base = OTHER; note = 2'-O-methyl modified nucleotide with thiophosphate linkage
  modified_base 20: mod_base = OTHER; note = 2'-O-methyl modified nucleotide with thiophosphate linkage
  modified_base 21: mod_base = OTHER; note = 2'-O-methyl modified nucleotide
ttatgtgcctcgataactctc

SEQ ID NO: 822 - RNA, 21 nt, synthetic construct
  source 1..21: mol_type = other RNA
  modified_base 1: mod_base = OTHER; note = 2'-O-methyl modified nucleotide with thiophosphate linkage
  modified_base 2: mod_base = OTHER; note = 2'-fluoro modified nucleotide with thiophosphate linkage
  modified_base 3: mod_base = OTHER; note = 2'-O-methyl modified nucleotide
  modified_base 4: mod_base = OTHER; note = 2'-O-methyl modified nucleotide
  modified_base 5: mod_base = OTHER; note = 2'-O-methyl modified nucleotide
  modified_base 6: mod_base = OTHER; note = 2'-fluoro modified nucleotide
  modified_base 7: mod_base = OTHER; note = 2'-O-methyl modified nucleotide
  modified_base 8: mod_base = OTHER; note = 2'-O-methyl modified nucleotide
  modified_base 9: mod_base = OTHER; note = 2'-O-methyl modified nucleotide
  modified_base 10: mod_base = OTHER; note = 2'-O-methyl modified nucleotide
  modified_base 11: mod_base = OTHER; note = 2'-O-methyl modified nucleotide
  modified_base 12: mod_base = OTHER; note = 2'-O-methyl modified nucleotide
  modified_base 13: mod_base = OTHER; note = 2'-O-methyl modified nucleotide
  modified_base 14: mod_base = OTHER; note = 2'-fluoro modified nucleotide
  modified_base 15: mod_base = OTHER; note = 2'-O-methyl modified nucleotide
  modified_base 16: mod_base = OTHER; note = 2'-fluoro modified nucleotide
  modified_base 17: mod_base = OTHER; note = 2'-O-methyl modified nucleotide
  modified_base 18: mod_base = OTHER; note = 2'-O-methyl modified nucleotide
  modified_base 19: mod_base = OTHER; note = 2'-O-methyl modified nucleotide with thiophosphate linkage
  modified_base 20: mod_base = OTHER; note = 2'-O-methyl modified nucleotide with thiophosphate linkage
  modified_base 21: mod_base = OTHER; note = 2'-O-methyl modified nucleotide
ttatgtgcctcgataactctc

SEQ ID NO: 823 - RNA, 21 nt, synthetic construct
  source 1..21: mol_type = other RNA
  modified_base 1: mod_base = OTHER; note = 2'-O-methyl modified nucleotide with thiophosphate linkage
  modified_base 2: mod_base = OTHER; note = 2'-fluoro modified nucleotide with thiophosphate linkage
  modified_base 3: mod_base = OTHER; note = 2'-O-methyl modified nucleotide
  modified_base 4: mod_base = OTHER; note = 2'-O-methyl modified nucleotide
  modified_base 5: mod_base = OTHER; note = 2'-O-methyl modified nucleotide
  modified_base 6: mod_base = OTHER; note = 2'-O-methyl modified nucleotide
  modified_base 7: mod_base = OTHER; note = 2'-fluoro modified nucleotide
  modified_base 8: mod_base = OTHER; note = 2'-O-methyl modified nucleotide
  modified_base 9: mod_base = OTHER; note = 2'-O-methyl modified nucleotide
  modified_base 10: mod_base = OTHER; note = 2'-O-methyl modified nucleotide
  modified_base 11: mod_base = OTHER; note = 2'-O-methyl modified nucleotide
  modified_base 12: mod_base = OTHER; note = 2'-fluoro modified nucleotide
  modified_base 13: mod_base = OTHER; note = 2'-O-methyl modified nucleotide
  modified_base 14: mod_base = OTHER; note = 2'-fluoro modified nucleotide
  modified_base 15: mod_base = OTHER; note = 2'-O-methyl modified nucleotide
  modified_base 16: mod_base = OTHER; note = 2'-fluoro modified nucleotide
  modified_base 17: mod_base = OTHER; note = 2'-O-methyl modified nucleotide
  modified_base 18: mod_base = OTHER; note = 2'-O-methyl modified nucleotide
  modified_base 19: mod_base = OTHER; note = 2'-O-methyl modified nucleotide with thiophosphate linkage
  modified_base 20: mod_base = OTHER; note = 2'-O-methyl modified nucleotide with thiophosphate linkage
  modified_base 21: mod_base = OTHER; note = 2'-O-methyl modified nucleotide
ttatgtgcctcgataactctc

SEQ ID NO: 824 - RNA, 21 nt, synthetic construct
  source 1..21: mol_type = other RNA
  modified_base 1: mod_base = OTHER; note = 2'-O-methyl modified nucleotide with thiophosphate linkage
  modified_base 2: mod_base = OTHER; note = 2'-fluoro modified nucleotide with thiophosphate linkage
  modified_base 3: mod_base = OTHER; note = 2'-O-methyl modified nucleotide
  modified_base 4: mod_base = OTHER; note = 2'-O-methyl modified nucleotide
  modified_base 5: mod_base = OTHER; note = 2'-O-methyl modified nucleotide
  modified_base 6: mod_base = OTHER; note = 2'-O-methyl modified nucleotide
  modified_base 7: mod_base = OTHER; note = 2'-fluoro modified nucleotide
  modified_base 8: mod_base = OTHER; note = 2'-O-methyl modified nucleotide
  modified_base 9: mod_base = OTHER; note = 2'-O-methyl modified nucleotide
  modified_base 10: mod_base = OTHER; note = 2'-O-methyl modified nucleotide
  modified_base 11: mod_base = OTHER; note = 2'-O-methyl modified nucleotide
  modified_base 12: mod_base = OTHER; note = 2'-fluoro modified nucleotide
  modified_base 13: mod_base = OTHER; note = 2'-O-methyl modified nucleotide
  modified_base 14: mod_base = OTHER; note = 2'-fluoro modified nucleotide
  modified_base 15: mod_base = OTHER; note = 2'-O-methyl modified nucleotide
  modified_base 16: mod_base = OTHER; note = 2'-fluoro modified nucleotide
  modified_base 17: mod_base = OTHER; note = 2'-O-methyl modified nucleotide
  modified_base 18: mod_base = OTHER; note = 2'-O-methyl modified nucleotide
  modified_base 19: mod_base = OTHER; note = 2'-O-methyl modified nucleotide with thiophosphate linkage
  modified_base 20: mod_base = OTHER; note = 2'-O-methyl modified nucleotide with thiophosphate linkage
  modified_base 21: mod_base = OTHER; note = 2'-O-methyl modified nucleotide
taatgtgcctcgataactctc

SEQ ID NO: 825 - RNA, 21 nt, synthetic construct
  source 1..21: mol_type = other RNA
  modified_base 1: mod_base = OTHER; note = 2'-O-methyl modified nucleotide with thiophosphate linkage
  modified_base 2: mod_base = OTHER; note = 2'-fluoro modified nucleotide with thiophosphate linkage
  modified_base 3: mod_base = OTHER; note = 2'-O-methyl modified nucleotide
  modified_base 4: mod_base = OTHER; note = 2'-O-methyl modified nucleotide
  modified_base 5: mod_base = OTHER; note = 2'-O-methyl modified nucleotide
  modified_base 6: mod_base = OTHER; note = 2'-O-methyl modified nucleotide
  modified_base 7: mod_base = OTHER; note = 2'-fluoro modified nucleotide
  modified_base 8: mod_base = OTHER; note = 2'-O-methyl modified nucleotide
  modified_base 9: mod_base = OTHER; note = 2'-O-methyl modified nucleotide
  modified_base 10: mod_base = OTHER; note = 2'-O-methyl modified nucleotide
  modified_base 11: mod_base = OTHER; note = 2'-O-methyl modified nucleotide
  modified_base 12: mod_base = OTHER; note = 2'-fluoro modified nucleotide
  modified_base 13: mod_base = OTHER; note = 2'-O-methyl modified nucleotide
  modified_base 14: mod_base = OTHER; note = 2'-fluoro modified nucleotide
  modified_base 15: mod_base = OTHER; note = 2'-O-methyl modified nucleotide
  modified_base 16: mod_base = OTHER; note = 2'-fluoro modified nucleotide
  modified_base 17: mod_base = OTHER; note = 2'-O-methyl modified nucleotide
  modified_base 18: mod_base = OTHER; note = 2'-O-methyl modified nucleotide
  modified_base 19: mod_base = OTHER; note = 2'-O-methyl modified nucleotide with thiophosphate linkage
  modified_base 20: mod_base = OTHER; note = 2'-O-methyl modified nucleotide with thiophosphate linkage
  modified_base 21: mod_base = OTHER; note = 2'-O-methyl modified nucleotide
ttatgtgcctcgataactctc

SEQ ID NO: 826 - RNA, 21 nt, synthetic construct
  source 1..21: mol_type = other RNA
  modified_base 1: mod_base = OTHER; note = 2'-O-methyl modified nucleotide with thiophosphate linkage
  modified_base 2: mod_base = OTHER; note = 2'-fluoro modified nucleotide with thiophosphate linkage
  modified_base 3: mod_base = OTHER; note = 2'-O-methyl modified nucleotide
  modified_base 4: mod_base = OTHER; note = 2'-O-methyl modified nucleotide
  modified_base 5: mod_base = OTHER; note = 2'-O-methyl modified nucleotide
  modified_base 6: mod_base = OTHER; note = 2'-O-methyl modified nucleotide
  modified_base 7: mod_base = OTHER; note = 2'-fluoro modified nucleotide
  modified_base 8: mod_base = OTHER; note = 2'-O-methyl modified nucleotide
  modified_base 9: mod_base = OTHER; note = 2'-O-methyl modified nucleotide
  modified_base 10: mod_base = OTHER; note = 2'-O-methyl modified nucleotide
  modified_base 11: mod_base = OTHER; note = 2'-O-methyl modified nucleotide
  modified_base 12: mod_base = OTHER; note = 2'-fluoro modified nucleotide
  modified_base 13: mod_base = OTHER; note = 2'-O-methyl modified nucleotide
  modified_base 14: mod_base = OTHER; note = 2'-fluoro modified nucleotide
  modified_base 15: mod_base = OTHER; note = 2'-O-methyl modified nucleotide
  modified_base 16: mod_base = OTHER; note = 2'-fluoro modified nucleotide
  modified_base 17: mod_base = OTHER; note = 2'-O-methyl modified nucleotide
  modified_base 18: mod_base = OTHER; note = 2'-O-methyl modified nucleotide
  modified_base 19: mod_base = OTHER; note = 2'-O-methyl modified nucleotide with thiophosphate linkage
  modified_base 20: mod_base = OTHER; note = 2'-O-methyl modified nucleotide with thiophosphate linkage
  modified_base 21: mod_base = OTHER; note = 2'-O-methyl modified nucleotide
tagatgaccaagcttggcaac

SEQ ID NO: 827 - RNA, 21 nt, synthetic construct
  source 1..21: mol_type = other RNA
  modified_base 1: mod_base = OTHER; note = 2'-O-methyl modified nucleotide with thiophosphate linkage
  modified_base 2: mod_base = OTHER; note = 2'-fluoro modified nucleotide with thiophosphate linkage
  modified_base 3: mod_base = OTHER; note = 2'-O-methyl modified nucleotide
  modified_base 4: mod_base = OTHER; note = 2'-O-methyl modified nucleotide
  modified_base 5: mod_base = OTHER; note = 2'-O-methyl modified nucleotide
  modified_base 6: mod_base = OTHER; note = 2'-O-methyl modified nucleotide
  modified_base 7: mod_base = OTHER; note = 2'-fluoro modified nucleotide
  modified_base 8: mod_base = OTHER; note = 2'-O-methyl modified nucleotide
  modified_base 9: mod_base = OTHER; note = 2'-O-methyl modified nucleotide
  modified_base 10: mod_base = OTHER; note = 2'-O-methyl modified nucleotide
  modified_base 11: mod_base = OTHER; note = 2'-O-methyl modified nucleotide
  modified_base 12: mod_base = OTHER; note = 2'-fluoro modified nucleotide
  modified_base 13: mod_base = OTHER; note = 2'-O-methyl modified nucleotide
  modified_base 14: mod_base = OTHER; note = 2'-fluoro modified nucleotide
  modified_base 15: mod_base = OTHER; note = 2'-O-methyl modified nucleotide
  modified_base 16: mod_base = OTHER; note = 2'-fluoro modified nucleotide
  modified_base 17: mod_base = OTHER; note = 2'-O-methyl modified nucleotide
  modified_base 18: mod_base = OTHER; note = 2'-O-methyl modified nucleotide
  modified_base 19: mod_base = OTHER; note = 2'-O-methyl modified nucleotide with thiophosphate linkage
  modified_base 20: mod_base = OTHER; note = 2'-O-methyl modified nucleotide with thiophosphate linkage
  modified_base 21: mod_base = OTHER; note = 2'-O-methyl modified nucleotide
aagatgaccaagcttggcaac

SEQ ID NO: 828 - RNA, 21 nt, synthetic construct
  source 1..21: mol_type = other RNA
  modified_base 1: mod_base = OTHER; note = 2'-O-methyl modified nucleotide with thiophosphate linkage
  modified_base 2: mod_base = OTHER; note = 2'-fluoro modified nucleotide with thiophosphate linkage
  modified_base 3: mod_base = OTHER; note = 2'-O-methyl modified nucleotide
  modified_base 4: mod_base = OTHER; note = 2'-O-methyl modified nucleotide
  modified_base 5: mod_base = OTHER; note = 2'-O-methyl modified nucleotide
  modified_base 6: mod_base = OTHER; note = 2'-O-methyl modified nucleotide
  modified_base 7: mod_base = OTHER; note = 2'-fluoro modified nucleotide
  modified_base 8: mod_base = OTHER; note = 2'-O-methyl modified nucleotide
  modified_base 9: mod_base = OTHER; note = 2'-O-methyl modified nucleotide
  modified_base 10: mod_base = OTHER; note = 2'-O-methyl modified nucleotide
  modified_base 11: mod_base = OTHER; note = 2'-O-methyl modified nucleotide
  modified_base 12: mod_base = OTHER; note = 2'-fluoro modified nucleotide
  modified_base 13: mod_base = OTHER; note = 2'-O-methyl modified nucleotide
  modified_base 14: mod_base = OTHER; note = 2'-fluoro modified nucleotide
  modified_base 15: mod_base = OTHER; note = 2'-O-methyl modified nucleotide
  modified_base 16: mod_base = OTHER; note = 2'-fluoro modified nucleotide
  modified_base 17: mod_base = OTHER; note = 2'-O-methyl modified nucleotide
  modified_base 18: mod_base = OTHER; note = 2'-O-methyl modified nucleotide
  modified_base 19: mod_base = OTHER; note = 2'-O-methyl modified nucleotide with thiophosphate linkage
  modified_base 20: mod_base = OTHER; note = 2'-O-methyl modified nucleotide with thiophosphate linkage
  modified_base 21: mod_base = OTHER; note = 2'-O-methyl modified nucleotide
gagatgaccaagcttggcaac

SEQ ID NO: 829 - RNA, 21 nt, synthetic construct
  source 1..21: mol_type = other RNA
  modified_base 1: mod_base = OTHER; note = 2'-O-methyl modified nucleotide with thiophosphate linkage
  modified_base 2: mod_base = OTHER; note = 2'-fluoro modified nucleotide with thiophosphate linkage
  modified_base 3: mod_base = OTHER; note = 2'-O-methyl modified nucleotide
  modified_base 4: mod_base = OTHER; note = 2'-O-methyl modified nucleotide
  modified_base 5: mod_base = OTHER; note = 2'-O-methyl modified nucleotide
  modified_base 6: mod_base = OTHER; note = 2'-O-methyl modified nucleotide
  modified_base 7: mod_base = OTHER; note = 2'-fluoro modified nucleotide
  modified_base 8: mod_base = OTHER; note = 2'-O-methyl modified nucleotide
  modified_base 9: mod_base = OTHER; note = 2'-O-methyl modified nucleotide
  modified_base 10: mod_base = OTHER; note = 2'-O-methyl modified nucleotide
  modified_base 11: mod_base = OTHER; note = 2'-O-methyl modified nucleotide
  modified_base 12: mod_base = OTHER; note = 2'-fluoro modified nucleotide
  modified_base 13: mod_base = OTHER; note = 2'-O-methyl modified nucleotide
  modified_base 14: mod_base = OTHER; note = 2'-fluoro modified nucleotide
  modified_base 15: mod_base = OTHER; note = 2'-O-methyl modified nucleotide
  modified_base 16: mod_base = OTHER; note = 2'-fluoro modified nucleotide
  modified_base 17: mod_base = OTHER; note = 2'-O-methyl modified nucleotide
  modified_base 18: mod_base = OTHER; note = 2'-O-methyl modified nucleotide
  modified_base 19: mod_base = OTHER; note = 2'-O-methyl modified nucleotide with thiophosphate linkage
  modified_base 20: mod_base = OTHER; note = 2'-O-methyl modified nucleotide with thiophosphate linkage
  modified_base 21: mod_base = OTHER; note = 2'-O-methyl modified nucleotide
cagatgaccaagcttggcaac

SEQ ID NO: 830 - RNA, 17 nt, synthetic construct
  source 1..17: mol_type = other RNA
  modified_base 1: mod_base = OTHER; note = 2'-O-methyl modified nucleotide with thiophosphate linkage
  modified_base 2: mod_base = OTHER; note = 2'-fluoro modified nucleotide with thiophosphate linkage
  modified_base 3: mod_base = OTHER; note = 2'-O-methyl modified nucleotide
  modified_base 4: mod_base = OTHER; note = 2'-O-methyl modified nucleotide
  modified_base 5: mod_base = OTHER; note = 2'-O-methyl modified nucleotide
  modified_base 6: mod_base = OTHER; note = 2'-O-methyl modified nucleotide
  modified_base 7: mod_base = OTHER; note = 2'-fluoro modified nucleotide
  modified_base 8: mod_base = OTHER; note = 2'-O-methyl modified nucleotide
  modified_base 9: mod_base = OTHER; note = 2'-O-methyl modified nucleotide
  modified_base 10: mod_base = OTHER; note = 2'-O-methyl modified nucleotide
  modified_base 11: mod_base = OTHER; note = 2'-O-methyl modified nucleotide
  modified_base 12: mod_base = OTHER; note = 2'-fluoro modified nucleotide
  modified_base 13: mod_base = OTHER; note = 2'-O-methyl modified nucleotide
  modified_base 14: mod_base = OTHER; note = 2'-fluoro modified nucleotide
  modified_base 15: mod_base = OTHER; note = 2'-O-methyl modified nucleotide with thiophosphate linkage
  modified_base 16: mod_base = OTHER; note = 2'-fluoro modified nucleotide with thiophosphate linkage
  modified_base 17: mod_base = OTHER; note = 2'-O-methyl modified nucleotide
tagatgaccaagcttgg

SEQ ID NO: 831 - RNA, 18 nt, synthetic construct
  source 1..18: mol_type = other RNA
  modified_base 1: mod_base = OTHER; note = 2'-O-methyl modified nucleotide with thiophosphate linkage
  modified_base 2: mod_base = OTHER; note = 2'-fluoro modified nucleotide with thiophosphate linkage
  modified_base 3: mod_base = OTHER; note = 2'-O-methyl modified nucleotide
  modified_base 4: mod_base = OTHER; note = 2'-O-methyl modified nucleotide
  modified_base 5: mod_base = OTHER; note = 2'-O-methyl modified nucleotide
  modified_base 6: mod_base = OTHER; note = 2'-O-methyl modified nucleotide
  modified_base 7: mod_base = OTHER; note = 2'-fluoro modified nucleotide
  modified_base 8: mod_base = OTHER; note = 2'-O-methyl modified nucleotide
  modified_base 9: mod_base = OTHER; note = 2'-O-methyl modified nucleotide
  modified_base 10: mod_base = OTHER; note = 2'-O-methyl modified nucleotide
  modified_base 11: mod_base = OTHER; note = 2'-O-methyl modified nucleotide
  modified_base 12: mod_base = OTHER; note = 2'-fluoro modified nucleotide
  modified_base 13: mod_base = OTHER; note = 2'-O-methyl modified nucleotide
  modified_base 14: mod_base = OTHER; note = 2'-fluoro modified nucleotide
  modified_base 15: mod_base = OTHER; note = 2'-O-methyl modified nucleotide
  modified_base 16: mod_base = OTHER; note = 2'-fluoro modified nucleotide with thiophosphate linkage
  modified_base 17: mod_base = OTHER; note = 2'-O-methyl modified nucleotide with thiophosphate linkage
  modified_base 18: mod_base = OTHER; note = 2'-O-methyl modified nucleotide
tagatgaccaagcttggc

SEQ ID NO: 832 - RNA, 19 nt, synthetic construct
  source 1..19: mol_type = other RNA
  modified_base 1: mod_base = OTHER; note = 2'-O-methyl modified nucleotide with thiophosphate linkage
  modified_base 2: mod_base = OTHER; note = 2'-fluoro modified nucleotide with thiophosphate linkage
  modified_base 3: mod_base = OTHER; note = 2'-O-methyl modified nucleotide
  modified_base 4: mod_base = OTHER; note = 2'-O-methyl modified nucleotide
  modified_base 5: mod_base = OTHER; note = 2'-O-methyl modified nucleotide
  modified_base 6: mod_base = OTHER; note = 2'-O-methyl modified nucleotide
  modified_base 7: mod_base = OTHER; note = 2'-fluoro modified nucleotide
  modified_base 8: mod_base = OTHER; note = 2'-O-methyl modified nucleotide
  modified_base 9: mod_base = OTHER; note = 2'-O-methyl modified nucleotide
  modified_base 10: mod_base = OTHER; note = 2'-O-methyl modified nucleotide
  modified_base 11: mod_base = OTHER; note = 2'-O-methyl modified nucleotide
  modified_base 12: mod_base = OTHER; note = 2'-fluoro modified nucleotide
  modified_base 13: mod_base = OTHER; note = 2'-O-methyl modified nucleotide
  modified_base 14: mod_base = OTHER; note = 2'-fluoro modified nucleotide
  modified_base 15: mod_base = OTHER; note = 2'-O-methyl modified nucleotide
  modified_base 16: mod_base = OTHER; note = 2'-fluoro modified nucleotide
  modified_base 17: mod_base = OTHER; note = 2'-O-methyl modified nucleotide with thiophosphate linkage
  modified_base 18: mod_base = OTHER; note = 2'-O-methyl modified nucleotide with thiophosphate linkage
  modified_base 19: mod_base = OTHER; note = 2'-O-methyl modified nucleotide
tagatgaccaagcttggct

SEQ ID NO: 833 - RNA, 19 nt, synthetic construct
  source 1..19: mol_type = other RNA
  modified_base 1: mod_base = OTHER; note = 2'-O-methyl modified nucleotide with thiophosphate linkage
  modified_base 2: mod_base = OTHER; note = 2'-fluoro modified nucleotide with thiophosphate linkage
  modified_base 3: mod_base = OTHER; note = 2'-O-methyl modified nucleotide
  modified_base 4: mod_base = OTHER; note = 2'-O-methyl modified nucleotide
  modified_base 5: mod_base = OTHER; note = 2'-O-methyl modified nucleotide
  modified_base 6: mod_base = OTHER; note = 2'-O-methyl modified nucleotide
  modified_base 7: mod_base = OTHER; note = 2'-fluoro modified nucleotide
  modified_base 8: mod_base = OTHER; note = 2'-O-methyl modified nucleotide
  modified_base 9: mod_base = OTHER; note = 2'-O-methyl modified nucleotide
  modified_base 10: mod_base = OTHER; note = 2'-O-methyl modified nucleotide
  modified_base 11: mod_base = OTHER; note = 2'-O-methyl modified nucleotide
  modified_base 12: mod_base = OTHER; note = 2'-fluoro modified nucleotide
  modified_base 13: mod_base = OTHER; note = 2'-O-methyl modified nucleotide
  modified_base 14: mod_base = OTHER; note = 2'-fluoro modified nucleotide
  modified_base 15: mod_base = OTHER; note = 2'-O-methyl modified nucleotide
  modified_base 16: mod_base = OTHER; note = 2'-fluoro modified nucleotide
  modified_base 17: mod_base = OTHER; note = 2'-O-methyl modified nucleotide with thiophosphate linkage
  modified_base 18: mod_base = OTHER; note = 2'-O-methyl modified nucleotide with thiophosphate linkage
  modified_base 19: mod_base = OTHER; note = 2'-O-methyl modified nucleotide
tagatgaccaagcttggca

SEQ ID NO: 834 - RNA, 19 nt, synthetic construct
  source 1..19: mol_type = other RNA
  modified_base 1: mod_base = OTHER; note = 2'-O-methyl modified nucleotide with thiophosphate linkage
  modified_base 2: mod_base = OTHER; note = 2'-fluoro modified nucleotide with thiophosphate linkage
  modified_base 3: mod_base = OTHER; note = 2'-O-methyl modified nucleotide
  modified_base 4: mod_base = OTHER; note = 2'-O-methyl modified nucleotide
  modified_base 5: mod_base = OTHER; note = 2'-O-methyl modified nucleotide
  modified_base 6: mod_base = OTHER; note = 2'-O-methyl modified nucleotide
  modified_base 7: mod_base = OTHER; note = 2'-fluoro modified nucleotide
  modified_base 8: mod_base = OTHER; note = 2'-O-methyl modified nucleotide
  modified_base 9: mod_base = OTHER; note = 2'-O-methyl modified nucleotide
  modified_base 10: mod_base = OTHER; note = 2'-O-methyl modified nucleotide
  modified_base 11: mod_base = OTHER; note = 2'-O-methyl modified nucleotide
  modified_base 12: mod_base = OTHER; note = 2'-fluoro modified nucleotide
  modified_base 13: mod_base = OTHER; note = 2'-O-methyl modified nucleotide
  modified_base 14: mod_base = OTHER; note = 2'-fluoro modified nucleotide
  modified_base 15: mod_base = OTHER; note = 2'-O-methyl modified nucleotide
  modified_base 16: mod_base = OTHER; note = 2'-fluoro modified nucleotide
  modified_base 17: mod_base = OTHER; note = 2'-O-methyl modified nucleotide with thiophosphate linkage
  modified_base 18: mod_base = OTHER; note = 2'-O-methyl modified nucleotide with thiophosphate linkage
  modified_base 19: mod_base = OTHER; note = 2'-O-methyl modified nucleotide
tagatgaccaagcttggcc

SEQ ID NO: 835 - RNA, 19 nt, synthetic construct
  source 1..19: mol_type = other RNA
  modified_base 1: mod_base = OTHER; note = 2'-O-methyl modified nucleotide with thiophosphate linkage
  modified_base 2: mod_base = OTHER; note = 2'-fluoro modified nucleotide with thiophosphate linkage
  modified_base 3: mod_base = OTHER; note = 2'-O-methyl modified nucleotide
  modified_base 4: mod_base = OTHER; note = 2'-O-methyl modified nucleotide
  modified_base 5: mod_base = OTHER; note = 2'-O-methyl modified nucleotide
  modified_base 6: mod_base = OTHER; note = 2'-O-methyl modified nucleotide
  modified_base 7: mod_base = OTHER; note = 2'-fluoro modified nucleotide
  modified_base 8: mod_base = OTHER; note = 2'-O-methyl modified nucleotide
  modified_base 9: mod_base = OTHER; note = 2'-O-methyl modified nucleotide
  modified_base 10: mod_base = OTHER; note = 2'-O-methyl modified nucleotide
  modified_base 11: mod_base = OTHER; note = 2'-O-methyl modified nucleotide
  modified_base 12: mod_base = OTHER; note = 2'-fluoro modified nucleotide
  modified_base 13: mod_base = OTHER; note = 2'-O-methyl modified nucleotide
  modified_base 14: mod_base = OTHER; note = 2'-fluoro modified nucleotide
  modified_base 15: mod_base = OTHER; note = 2'-O-methyl modified nucleotide
  modified_base 16: mod_base = OTHER; note = 2'-fluoro modified nucleotide
  modified_base 17: mod_base = OTHER; note = 2'-O-methyl modified nucleotide with thiophosphate linkage
  modified_base 18: mod_base = OTHER; note = 2'-O-methyl modified nucleotide with thiophosphate linkage
  modified_base 19: mod_base = OTHER; note = 2'-O-methyl modified nucleotide
tagatgaccaagcttggcg

SEQ ID NO: 836 - RNA, 20 nt, synthetic construct
  source 1..20: mol_type = other RNA
  modified_base 1: mod_base = OTHER; note = 2'-O-methyl modified nucleotide with thiophosphate linkage
  modified_base 2: mod_base = OTHER; note = 2'-fluoro modified nucleotide with thiophosphate linkage
  modified_base 3: mod_base = OTHER; note = 2'-O-methyl modified nucleotide
  modified_base 4: mod_base = OTHER; note = 2'-O-methyl modified nucleotide
  modified_base 5: mod_base = OTHER; note = 2'-O-methyl modified nucleotide
  modified_base 6: mod_base = OTHER; note = 2'-O-methyl modified nucleotide
  modified_base 7: mod_base = OTHER; note = 2'-fluoro modified nucleotide
  modified_base 8: mod_base = OTHER; note = 2'-O-methyl modified nucleotide
  modified_base 9: mod_base = OTHER; note = 2'-O-methyl modified nucleotide
  modified_base 10: mod_base = OTHER; note = 2'-O-methyl modified nucleotide
  modified_base 11: mod_base = OTHER; note = 2'-O-methyl modified nucleotide
  modified_base 12: mod_base = OTHER; note = 2'-fluoro modified nucleotide
  modified_base 13: mod_base = OTHER; note = 2'-O-methyl modified nucleotide
  modified_base 14: mod_base = OTHER; note = 2'-fluoro modified nucleotide
  modified_base 15: mod_base = OTHER; note = 2'-O-methyl modified nucleotide
  modified_base 16: mod_base = OTHER; note = 2'-fluoro modified nucleotide
  modified_base 17: mod_base = OTHER; note = 2'-O-methyl modified nucleotide
  modified_base 18: mod_base = OTHER; note = 2'-O-methyl modified nucleotide with thiophosphate linkage
  modified_base 19: mod_base = OTHER; note = 2'-O-methyl modified nucleotide with thiophosphate linkage
  modified_base 20: mod_base = OTHER; note = 2'-O-methyl modified nucleotide
tagatgaccaagcttggcat

SEQ ID NO: 837 - RNA, 20 nt, synthetic construct
  source 1..20: mol_type = other RNA
  modified_base 1: mod_base = OTHER; note = 2'-O-methyl modified nucleotide with thiophosphate linkage
  modified_base 2: mod_base = OTHER; note = 2'-fluoro modified nucleotide with thiophosphate linkage
  modified_base 3: mod_base = OTHER; note = 2'-O-methyl modified nucleotide
  modified_base 4: mod_base = OTHER; note = 2'-O-methyl modified nucleotide
  modified_base 5: mod_base = OTHER; note = 2'-O-methyl modified nucleotide
  modified_base 6: mod_base = OTHER; note = 2'-O-methyl modified nucleotide
  modified_base 7: mod_base = OTHER; note = 2'-fluoro modified nucleotide
  modified_base 8: mod_base = OTHER; note = 2'-O-methyl modified nucleotide
  modified_base 9: mod_base = OTHER; note = 2'-O-methyl modified nucleotide
  modified_base 10: mod_base = OTHER; note = 2'-O-methyl modified nucleotide
  modified_base 11: mod_base = OTHER; note = 2'-O-methyl modified nucleotide
  modified_base 12: mod_base = OTHER; note = 2'-fluoro modified nucleotide
  modified_base 13: mod_base = OTHER; note = 2'-O-methyl modified nucleotide
  modified_base 14: mod_base = OTHER; note = 2'-fluoro modified nucleotide
  modified_base 15: mod_base = OTHER; note = 2'-O-methyl modified nucleotide
  modified_base 16: mod_base = OTHER; note = 2'-fluoro modified nucleotide
  modified_base 17: mod_base = OTHER; note = 2'-O-methyl modified nucleotide
  modified_base 18: mod_base = OTHER; note = 2'-O-methyl modified nucleotide with thiophosphate linkage
  modified_base 19: mod_base = OTHER; note = 2'-O-methyl modified nucleotide with thiophosphate linkage
  modified_base 20: mod_base = OTHER; note = 2'-O-methyl modified nucleotide
tagatgaccaagcttggcaa

SEQ ID NO: 838 - RNA, 20 nt, synthetic construct
  source 1..20: mol_type = other RNA
  modified_base 1: mod_base = OTHER; note = 2'-O-methyl modified nucleotide with thiophosphate linkage
  modified_base 2: mod_base = OTHER; note = 2'-fluoro modified nucleotide with thiophosphate linkage
  modified_base 3: mod_base = OTHER; note = 2'-O-methyl modified nucleotide
  modified_base 4: mod_base = OTHER; note = 2'-O-methyl modified nucleotide
  modified_base 5: mod_base = OTHER; note = 2'-O-methyl modified nucleotide
  modified_base 6: mod_base = OTHER; note = 2'-O-methyl modified nucleotide
  modified_base 7: mod_base = OTHER; note = 2'-fluoro modified nucleotide
  modified_base 8: mod_base = OTHER; note = 2'-O-methyl modified nucleotide
  modified_base 9: mod_base = OTHER; note = 2'-O-methyl modified nucleotide
  modified_base 10: mod_base = OTHER; note = 2'-O-methyl modified nucleotide
  modified_base 11: mod_base = OTHER; note = 2'-O-methyl modified nucleotide
  modified_base 12: mod_base = OTHER; note = 2'-fluoro modified nucleotide
  modified_base 13: mod_base = OTHER; note = 2'-O-methyl modified nucleotide
  modified_base 14: mod_base = OTHER; note = 2'-fluoro modified nucleotide
  modified_base 15: mod_base = OTHER; note = 2'-O-methyl modified nucleotide
  modified_base 16: mod_base = OTHER; note = 2'-fluoro modified nucleotide
  modified_base 17: mod_base = OTHER; note = 2'-O-methyl modified nucleotide
  modified_base 18: mod_base = OTHER; note = 2'-O-methyl modified nucleotide with thiophosphate linkage
  modified_base 19: mod_base = OTHER; note = 2'-O-methyl modified nucleotide with thiophosphate linkage
  modified_base 20: mod_base = OTHER; note = 2'-O-methyl modified nucleotide
tagatgaccaagcttggcac

SEQ ID NO: 839 - RNA, 20 nt, synthetic construct
  source 1..20: mol_type = other RNA
  modified_base 1: mod_base = OTHER; note = 2'-O-methyl modified nucleotide with thiophosphate linkage
  modified_base 2: mod_base = OTHER; note = 2'-fluoro modified nucleotide with thiophosphate linkage
  modified_base 3: mod_base = OTHER; note = 2'-O-methyl modified nucleotide
  modified_base 4: mod_base = OTHER; note = 2'-O-methyl modified nucleotide
  modified_base 5: mod_base = OTHER; note = 2'-O-methyl modified nucleotide
  modified_base 6: mod_base = OTHER; note = 2'-O-methyl modified nucleotide
  modified_base 7: mod_base = OTHER; note = 2'-fluoro modified nucleotide
  modified_base 8: mod_base = OTHER; note = 2'-O-methyl modified nucleotide
  modified_base 9: mod_base = OTHER; note = 2'-O-methyl modified nucleotide
  modified_base 10: mod_base = OTHER; note = 2'-O-methyl modified nucleotide
  modified_base 11: mod_base = OTHER; note = 2'-O-methyl modified nucleotide
  modified_base 12: mod_base = OTHER; note = 2'-fluoro modified nucleotide
  modified_base 13: mod_base = OTHER; note = 2'-O-methyl modified nucleotide
  modified_base 14: mod_base = OTHER; note = 2'-fluoro modified nucleotide
  modified_base 15: mod_base = OTHER; note = 2'-O-methyl modified nucleotide
  modified_base 16: mod_base = OTHER; note = 2'-fluoro modified nucleotide
  modified_base 17: mod_base = OTHER; note = 2'-O-methyl modified nucleotide
  modified_base 18: mod_base = OTHER; note = 2'-O-methyl modified nucleotide with thiophosphate linkage
  modified_base 19: mod_base = OTHER; note = 2'-O-methyl modified nucleotide with thiophosphate linkage
  modified_base 20: mod_base = OTHER; note = 2'-O-methyl modified nucleotide
tagatgaccaagcttggcag

SEQ ID NO: 840 - RNA, 21 nt, synthetic construct
  source 1..21: mol_type = other RNA
  modified_base 1: mod_base = OTHER; note = 2'-O-methyl modified nucleotide with thiophosphate linkage
  modified_base 2: mod_base = OTHER; note = 2'-fluoro modified nucleotide with thiophosphate linkage
  modified_base 3: mod_base = OTHER; note = 2'-O-methyl modified nucleotide
  modified_base 4: mod_base = OTHER; note = 2'-O-methyl modified nucleotide
  modified_base 5: mod_base = OTHER; note = 2'-O-methyl modified nucleotide
  modified_base 6: mod_base = OTHER; note = 2'-O-methyl modified nucleotide
  modified_base 7: mod_base = OTHER; note = 2'-fluoro modified nucleotide
  modified_base 8: mod_base = OTHER; note = 2'-O-methyl modified nucleotide
  modified_base 9: mod_base = OTHER; note = 2'-O-methyl modified nucleotide
  modified_base 10: mod_base = OTHER; note = 2'-O-methyl modified nucleotide
  modified_base 11: mod_base = OTHER; note = 2'-O-methyl modified nucleotide
  modified_base 12: mod_base = OTHER; note = 2'-fluoro modified nucleotide
  modified_base 13: mod_base = OTHER; note = 2'-O-methyl modified nucleotide
  modified_base 14: mod_base = OTHER; note = 2'-fluoro modified nucleotide
  modified_base 15: mod_base = OTHER; note = 2'-O-methyl modified nucleotide
  modified_base 16: mod_base = OTHER; note = 2'-fluoro modified nucleotide
  modified_base 17: mod_base = OTHER; note = 2'-O-methyl modified nucleotide
  modified_base 18: mod_base = OTHER; note = 2'-O-methyl modified nucleotide
  modified_base 19: mod_base = OTHER; note = 2'-O-methyl modified nucleotide with thiophosphate linkage
  modified_base 20: mod_base = OTHER; note = 2'-O-methyl modified nucleotide with thiophosphate linkage
  modified_base 21: mod_base = OTHER; note = 2'-O-methyl modified nucleotide
tagatgaccaagcttggcaaa

SEQ ID NO: 841 - RNA, 21 nt, synthetic construct
  source 1..21: mol_type = other RNA
  modified_base 1: mod_base = OTHER; note = 2'-O-methyl modified nucleotide with thiophosphate linkage
  modified_base 2: mod_base = OTHER; note = 2'-fluoro modified nucleotide with thiophosphate linkage
  modified_base 3: mod_base = OTHER; note = 2'-O-methyl modified nucleotide
  modified_base 4: mod_base = OTHER; note = 2'-O-methyl modified nucleotide
  modified_base 5: mod_base = OTHER; note = 2'-O-methyl modified nucleotide
  modified_base 6: mod_base = OTHER; note = 2'-O-methyl modified nucleotide
  modified_base 7: mod_base = OTHER; note = 2'-fluoro modified nucleotide
  modified_base 8: mod_base = OTHER; note = 2'-O-methyl modified nucleotide
  modified_base 9: mod_base = OTHER; note = 2'-O-methyl modified nucleotide
  modified_base 10: mod_base = OTHER; note = 2'-O-methyl modified nucleotide
  modified_base 11: mod_base = OTHER; note = 2'-O-methyl modified nucleotide
  modified_base 12: mod_base = OTHER; note = 2'-fluoro modified nucleotide
  modified_base 13: mod_base = OTHER; note = 2'-O-methyl modified nucleotide
  modified_base 14: mod_base = OTHER; note = 2'-fluoro modified nucleotide
  modified_base 15: mod_base = OTHER; note = 2'-O-methyl modified nucleotide
  modified_base 16: mod_base = OTHER; note = 2'-fluoro modified nucleotide
  modified_base 17: mod_base = OTHER; note = 2'-O-methyl modified nucleotide
  modified_base 18: mod_base = OTHER; note = 2'-O-methyl modified nucleotide
  modified_base 19: mod_base = OTHER; note = 2'-O-methyl modified nucleotide with thiophosphate linkage
  modified_base 20: mod_base = OTHER; note = 2'-O-methyl modified nucleotide with thiophosphate linkage
  modified_base 21: mod_base = OTHER; note = 2'-O-methyl modified nucleotide
tagatgaccaagcttggcaag

SEQ ID NO: 842 - RNA, 21 nt, synthetic construct
  source 1..21: mol_type = other RNA
  modified_base 1: mod_base = OTHER; note = 2'-O-methyl modified nucleotide with thiophosphate linkage
  modified_base 2: mod_base = OTHER; note = 2'-fluoro modified nucleotide with thiophosphate linkage
  modified_base 3: mod_base = OTHER; note = 2'-O-methyl modified nucleotide
  modified_base 4: mod_base = OTHER; note = 2'-O-methyl modified nucleotide
  modified_base 5: mod_base = OTHER; note = 2'-O-methyl modified nucleotide
  modified_base 6: mod_base = OTHER; note = 2'-O-methyl modified nucleotide
  modified_base 7: mod_base = OTHER; note = 2'-fluoro modified nucleotide
  modified_base 8: mod_base = OTHER; note = 2'-O-methyl modified nucleotide
  modified_base 9: mod_base = OTHER; note = 2'-O-methyl modified nucleotide
  modified_base 10: mod_base = OTHER; note = 2'-O-methyl modified nucleotide
  modified_base 11: mod_base = OTHER; note = 2'-O-methyl modified nucleotide
  modified_base 12: mod_base = OTHER; note = 2'-fluoro modified nucleotide
  modified_base 13: mod_base = OTHER; note = 2'-O-methyl modified nucleotide
  modified_base 14: mod_base = OTHER; note = 2'-fluoro modified nucleotide
  modified_base 15: mod_base = OTHER; note = 2'-O-methyl modified nucleotide
  modified_base 16: mod_base = OTHER; note = 2'-fluoro modified nucleotide
  modified_base 17: mod_base = OTHER; note = 2'-O-methyl modified nucleotide
  modified_base 18: mod_base = OTHER; note = 2'-O-methyl modified nucleotide
  modified_base 19: mod_base = OTHER; note = 2'-O-methyl modified nucleotide with thiophosphate linkage
  modified_base 20: mod_base = OTHER; note = 2'-O-methyl modified nucleotide with thiophosphate linkage
  modified_base 21: mod_base = OTHER; note = 2'-O-methyl modified nucleotide
tagatgaccaagcttggcaat

SEQ ID NO: 843 - RNA, 22 nt, synthetic construct
  source 1..22: mol_type = other RNA
  modified_base 1: mod_base = OTHER; note = 2'-O-methyl modified nucleotide with thiophosphate linkage
  modified_base 2: mod_base = OTHER; note = 2'-fluoro modified nucleotide with thiophosphate linkage
  modified_base 3: mod_base = OTHER; note = 2'-O-methyl modified nucleotide
  modified_base 4: mod_base = OTHER; note = 2'-O-methyl modified nucleotide
  modified_base 5: mod_base = OTHER; note = 2'-O-methyl modified nucleotide
  modified_base 6: mod_base = OTHER; note = 2'-O-methyl modified nucleotide
  modified_base 7: mod_base = OTHER; note = 2'-fluoro modified nucleotide
  modified_base 8: mod_base = OTHER; note = 2'-O-methyl modified nucleotide
  modified_base 9: mod_base = OTHER; note = 2'-O-methyl modified nucleotide
  modified_base 10: mod_base = OTHER; note = 2'-O-methyl modified nucleotide
  modified_base 11: mod_base = OTHER; note = 2'-O-methyl modified nucleotide
  modified_base 12: mod_base = OTHER; note = 2'-fluoro modified nucleotide
  modified_base 13: mod_base = OTHER; note = 2'-O-methyl modified nucleotide
  modified_base 14: mod_base = OTHER; note = 2'-fluoro modified nucleotide
  modified_base 15: mod_base = OTHER; note = 2'-O-methyl modified nucleotide
  modified_base 16: mod_base = OTHER; note = 2'-fluoro modified nucleotide
  modified_base 17: mod_base = OTHER; note = 2'-O-methyl modified nucleotide
  modified_base 18: mod_base = OTHER; note = 2'-O-methyl modified nucleotide
  modified_base 19: mod_base = OTHER; note = 2'-O-methyl modified nucleotide
  modified_base 20: mod_base = OTHER; note = 2'-O-methyl modified nucleotide with thiophosphate linkage
  modified_base 21: mod_base = OTHER; note = 2'-O-methyl modified nucleotide with thiophosphate linkage
  modified_base 22: mod_base = OTHER; note = 2'-O-methyl modified nucleotide
tagatgaccaagcttggcaagt

SEQ ID NO: 844 - RNA, 23 nt, synthetic construct
  source 1..23: mol_type = other RNA
  modified_base 1: mod_base = OTHER; note = 2'-O-methyl modified nucleotide with thiophosphate linkage
  modified_base 2: mod_base = OTHER; note = 2'-fluoro modified nucleotide with thiophosphate linkage
  modified_base 3: mod_base = OTHER; note = 2'-O-methyl modified nucleotide
  modified_base 4: mod_base = OTHER; note = 2'-O-methyl modified nucleotide
  modified_base 5: mod_base = OTHER; note = 2'-O-methyl modified nucleotide
  modified_base 6: mod_base = OTHER; note = 2'-O-methyl modified nucleotide
  modified_base 7: mod_base = OTHER; note = 2'-fluoro modified nucleotide
  modified_base 8: mod_base = OTHER; note = 2'-O-methyl modified nucleotide
  modified_base 9: mod_base = OTHER; note = 2'-O-methyl modified nucleotide
  modified_base 10: mod_base = OTHER; note = 2'-O-methyl modified nucleotide
  modified_base 11: mod_base = OTHER; note = 2'-O-methyl modified nucleotide
  modified_base 12: mod_base = OTHER; note = 2'-fluoro modified nucleotide
  modified_base 13: mod_base = OTHER; note = 2'-O-methyl modified nucleotide
  modified_base 14: mod_base = OTHER; note = 2'-fluoro modified nucleotide
  modified_base 15: mod_base = OTHER; note = 2'-O-methyl modified nucleotide
  modified_base 16: mod_base = OTHER; note = 2'-fluoro modified nucleotide
  modified_base 17: mod_base = OTHER; note = 2'-O-methyl modified nucleotide
  modified_base 18: mod_base = OTHER; note = 2'-O-methyl modified nucleotide
  modified_base 19: mod_base = OTHER; note = 2'-O-methyl modified nucleotide
  modified_base 20: mod_base = OTHER; note = 2'-O-methyl modified nucleotide
  modified_base 21: mod_base = OTHER; note = 2'-O-methyl modified nucleotide with thiophosphate linkage
  modified_base 22: mod_base = OTHER; note = 2'-O-methyl modified nucleotide with thiophosphate linkage
  modified_base 23: mod_base = OTHER; note = 2'-O-methyl modified nucleotide
tagatgaccaagcttggcaagtt

SEQ ID NO: 845 - RNA, 24 nt, synthetic construct
  source 1..24: mol_type = other RNA
  modified_base 1: mod_base = OTHER; note = 2'-O-methyl modified nucleotide with thiophosphate linkage
  modified_base 2: mod_base = OTHER; note = 2'-fluoro modified nucleotide with thiophosphate linkage
  modified_base 3: mod_base = OTHER; note = 2'-O-methyl modified nucleotide
  modified_base 4: mod_base = OTHER; note = 2'-O-methyl modified nucleotide
  modified_base 5: mod_base = OTHER; note = 2'-O-methyl modified nucleotide
  modified_base 6: mod_base = OTHER; note = 2'-O-methyl modified nucleotide
  modified_base 7: mod_base = OTHER; note = 2'-fluoro modified nucleotide
  modified_base 8: mod_base = OTHER; note = 2'-O-methyl modified nucleotide
  modified_base 9: mod_base = OTHER; note = 2'-O-methyl modified nucleotide
  modified_base 10: mod_base = OTHER; note = 2'-O-methyl modified nucleotide
  modified_base 11: mod_base = OTHER; note = 2'-O-methyl modified nucleotide
  modified_base 12: mod_base = OTHER; note = 2'-fluoro modified nucleotide
  modified_base 13: mod_base = OTHER; note = 2'-O-methyl modified nucleotide
  modified_base 14: mod_base = OTHER; note = 2'-fluoro modified nucleotide
  modified_base 15: mod_base = OTHER; note = 2'-O-methyl modified nucleotide
  modified_base 16: mod_base = OTHER; note = 2'-fluoro modified nucleotide
  modified_base 17: mod_base = OTHER; note = 2'-O-methyl modified nucleotide
  modified_base 18: mod_base = OTHER; note = 2'-O-methyl modified nucleotide
  modified_base 19: mod_base = OTHER; note = 2'-O-methyl modified nucleotide
  modified_base 20: mod_base = OTHER; note = 2'-O-methyl modified nucleotide
  modified_base 21: mod_base = OTHER; note = 2'-O-methyl modified nucleotide
  modified_base 22: mod_base = OTHER; note = 2'-O-methyl modified nucleotide with thiophosphate linkage
  modified_base 23: mod_base = OTHER; note = 2'-O-methyl modified nucleotide with thiophosphate linkage
  modified_base 24: mod_base = OTHER; note = 2'-O-methyl modified nucleotide
tagatgaccaagcttggcaagttc

SEQ ID NO: 846 - RNA, 25 nt, synthetic construct
  source 1..25: mol_type = other RNA
  modified_base 1: mod_base = OTHER; note = 2'-O-methyl modified nucleotide with thiophosphate linkage
  modified_base 2: mod_base = OTHER; note = 2'-fluoro modified nucleotide with thiophosphate linkage
  modified_base 3: mod_base = OTHER; note = 2'-O-methyl modified nucleotide
  modified_base 4: mod_base = OTHER; note = 2'-O-methyl modified nucleotide
  modified_base 5: mod_base = OTHER; note = 2'-O-methyl modified nucleotide
  modified_base 6: mod_base = OTHER; note = 2'-O-methyl modified nucleotide
  modified_base 7: mod_base = OTHER; note = 2'-fluoro modified nucleotide
  modified_base 8: mod_base = OTHER; note = 2'-O-methyl modified nucleotide
  modified_base 9: mod_base = OTHER; note = 2'-O-methyl modified nucleotide
  modified_base 10: mod_base = OTHER; note = 2'-O-methyl modified nucleotide
  modified_base 11: mod_base = OTHER; note = 2'-O-methyl modified nucleotide
  modified_base 12: mod_base = OTHER; note = 2'-fluoro modified nucleotide
  modified_base 13: mod_base = OTHER; note = 2'-O-methyl modified nucleotide
  modified_base 14: mod_base = OTHER; note = 2'-fluoro modified nucleotide
  modified_base 15: mod_base = OTHER; note = 2'-O-methyl modified nucleotide
  modified_base 16: mod_base = OTHER; note = 2'-fluoro modified nucleotide
  modified_base 17: mod_base = OTHER; note = 2'-O-methyl modified nucleotide
  modified_base 18: mod_base = OTHER; note = 2'-O-methyl modified nucleotide
  modified_base 19: mod_base = OTHER; note = 2'-O-methyl modified nucleotide
  modified_base 20: mod_base = OTHER; note = 2'-O-methyl modified nucleotide
  modified_base 21: mod_base = OTHER; note = 2'-O-methyl modified nucleotide
  modified_base 22: mod_base = OTHER; note = 2'-O-methyl modified nucleotide
  modified_base 23: mod_base = OTHER; note = 2'-O-methyl modified nucleotide with thiophosphate linkage
  modified_base 24: mod_base = OTHER; note = 2'-O-methyl modified nucleotide with thiophosphate linkage
  modified_base 25: mod_base = OTHER; note = 2'-O-methyl modified nucleotide
tagatgaccaagcttggcaagttct

SEQ ID NO: 847 - RNA, 26 nt, synthetic construct
  source 1..26: mol_type = other RNA
  modified_base 1: mod_base = OTHER; note = 2'-O-methyl modified nucleotide with thiophosphate linkage
  modified_base 2: mod_base = OTHER; note = 2'-fluoro modified nucleotide with thiophosphate linkage
  modified_base 3: mod_base = OTHER; note = 2'-O-methyl modified nucleotide
  modified_base 4: mod_base = OTHER; note = 2'-O-methyl modified nucleotide
  modified_base 5: mod_base = OTHER; note = 2'-O-methyl modified nucleotide
  modified_base 6: mod_base = OTHER; note = 2'-O-methyl modified nucleotide
  modified_base 7: mod_base = OTHER; note = 2'-fluoro modified nucleotide
  modified_base 8: mod_base = OTHER; note = 2'-O-methyl modified nucleotide
  modified_base 9: mod_base = OTHER; note = 2'-O-methyl modified nucleotide
  modified_base 10: mod_base = OTHER; note = 2'-O-methyl modified nucleotide
  modified_base 11: mod_base = OTHER; note = 2'-O-methyl modified nucleotide
  modified_base 12: mod_base = OTHER; note = 2'-fluoro modified nucleotide
  modified_base 13: mod_base = OTHER; note = 2'-O-methyl modified nucleotide
  modified_base 14: mod_base = OTHER; note = 2'-fluoro modified nucleotide
  modified_base 15: mod_base = OTHER; note = 2'-O-methyl modified nucleotide
  modified_base 16: mod_base = OTHER; note = 2'-fluoro modified nucleotide
  modified_base 17: mod_base = OTHER; note = 2'-O-methyl modified nucleotide
  modified_base 18: mod_base = OTHER; note = 2'-O-methyl modified nucleotide
  modified_base 19: mod_base = OTHER; note = 2'-O-methyl modified nucleotide
  modified_base 20: mod_base = OTHER; note = 2'-O-methyl modified nucleotide
  modified_base 21: mod_base = OTHER; note = 2'-O-methyl modified nucleotide
  modified_base 22: mod_base = OTHER; note = 2'-O-methyl modified nucleotide
  modified_base 23: mod_base = OTHER; note = 2'-O-methyl modified nucleotide
  modified_base 24: mod_base = OTHER; note = 2'-O-methyl modified nucleotide with thiophosphate linkage
  modified_base 25: mod_base = OTHER; note = 2'-O-methyl modified nucleotide with thiophosphate linkage
  modified_base 26: mod_base = OTHER; note = 2'-O-methyl modified nucleotide
tagatgaccaagcttggcaagttctt

SEQ ID NO: 848 - RNA, 32 nt, synthetic construct; identical to SEQ ID NO: 662
  source 1..32: mol_type = other RNA
  modified_base 1: mod_base = OTHER; note = 2'-O-methyl modified nucleotide with thiophosphate linkage
  modified_base 2: mod_base = OTHER; note = 2'-fluoro modified nucleotide with thiophosphate linkage
  modified_base 3: mod_base = OTHER; note = 2'-O-methyl modified nucleotide
  modified_base 4: mod_base = OTHER; note = 2'-O-methyl modified nucleotide
  modified_base 5: mod_base = OTHER; note = 2'-O-methyl modified nucleotide
  modified_base 6: mod_base = OTHER; note = 2'-O-methyl modified nucleotide
  modified_base 7: mod_base = OTHER; note = 2'-fluoro modified nucleotide
  modified_base 8: mod_base = OTHER; note = 2'-O-methyl modified nucleotide
  modified_base 9: mod_base = OTHER; note = 2'-O-methyl modified nucleotide
  modified_base 10: mod_base = OTHER; note = 2'-O-methyl modified nucleotide
  modified_base 11: mod_base = OTHER; note = 2'-O-methyl modified nucleotide
  modified_base 12: mod_base = OTHER; note = 2'-fluoro modified nucleotide
  modified_base 13: mod_base = OTHER; note = 2'-O-methyl modified nucleotide
  modified_base 14: mod_base = OTHER; note = 2'-fluoro modified nucleotide
  modified_base 15: mod_base = OTHER; note = 2'-O-methyl modified nucleotide
  modified_base 16: mod_base = OTHER; note = 2'-fluoro modified nucleotide
  modified_base 17: mod_base = OTHER; note = 2'-O-methyl modified nucleotide
  modified_base 18: mod_base = OTHER; note = 2'-O-methyl modified nucleotide
  modified_base 19: mod_base = OTHER; note = 2'-O-methyl modified nucleotide
  modified_base 20: mod_base = OTHER; note = 2'-O-methyl modified nucleotide
  modified_base 21: mod_base = OTHER; note = 2'-O-methyl modified nucleotide
  modified_base 22: mod_base = OTHER; note = 2'-O-methyl modified nucleotide
  modified_base 23: mod_base = OTHER; note = 2'-O-methyl modified nucleotide
  modified_base 24: mod_base = OTHER; note = 2'-O-methyl modified nucleotide
  modified_base 25: mod_base = OTHER; note = 2'-O-methyl modified nucleotide
  modified_base 26: mod_base = OTHER; note = 2'-O-methyl modified nucleotide
  modified_base 27: mod_base = OTHER; note = 2'-O-methyl modified nucleotide
  modified_base 28: mod_base = OTHER; note = 2'-O-methyl modified nucleotide
  modified_base 29: mod_base = OTHER; note = 2'-O-methyl modified nucleotide
  modified_base 30: mod_base = OTHER; note = 2'-O-methyl modified nucleotide with thiophosphate linkage
  modified_base 31: mod_base = OTHER; note = 2'-O-methyl modified nucleotide with thiophosphate linkage
  modified_base 32: mod_base = OTHER; note = 2'-O-methyl modified nucleotide

SEQ ID NO: 849 - RNA, 23 nt, synthetic construct
  source 1..23: mol_type = other RNA
  modified_base 1: mod_base = OTHER; note = 2'-O-methyl modified nucleotide with thiophosphate linkage
  modified_base 2: mod_base = OTHER; note = 2'-fluoro modified nucleotide with thiophosphate linkage
  modified_base 3: mod_base = OTHER; note = 2'-O-methyl modified nucleotide
  modified_base 4: mod_base = OTHER; note = 2'-O-methyl modified nucleotide
  modified_base 5: mod_base = OTHER; note = 2'-O-methyl modified nucleotide
  modified_base 6: mod_base = OTHER; note = 2'-O-methyl modified nucleotide
  modified_base 7: mod_base = OTHER; note = 2'-fluoro modified nucleotide
  modified_base 8: mod_base = OTHER; note = 2'-O-methyl modified nucleotide
  modified_base 9: mod_base = OTHER; note = 2'-O-methyl modified nucleotide
  modified_base 10: mod_base = OTHER; note = 2'-O-methyl modified nucleotide
  modified_base 11: mod_base = OTHER; note = 2'-O-methyl modified nucleotide
  modified_base 12: mod_base = OTHER; note = 2'-fluoro modified nucleotide
  modified_base 13: mod_base = OTHER; note = 2'-O-methyl modified nucleotide
  modified_base 14: mod_base = OTHER; note = 2'-fluoro modified nucleotide
  modified_base 15: mod_base = OTHER; note = 2'-O-methyl modified nucleotide
  modified_base 16: mod_base = OTHER; note = 2'-fluoro modified nucleotide
  modified_base 17: mod_base = OTHER; note = 2'-O-methyl modified nucleotide
  modified_base 18: mod_base = OTHER; note = 2'-O-methyl modified nucleotide
  modified_base 19: mod_base = OTHER; note = 2'-O-methyl modified nucleotide
  modified_base 20: mod_base = OTHER; note = 2'-O-methyl modified nucleotide
  modified_base 21: mod_base = OTHER; note = 2'-O-methyl modified nucleotide with thiophosphate linkage
  modified_base 22: mod_base = OTHER; note = 2'-O-methyl modified nucleotide with thiophosphate linkage
  modified_base 23: mod_base = OTHER; note = 2'-O-methyl modified nucleotide
tagatgaccaagcttggcaactt

SEQ ID NO: 850 - RNA, 23 nt, synthetic construct
  source 1..23: mol_type = other RNA
  modified_base 1: mod_base = OTHER; note = 2'-O-methyl modified nucleotide with thiophosphate linkage
  modified_base 2: mod_base = OTHER; note = 2'-fluoro modified nucleotide with thiophosphate linkage
  modified_base 3: mod_base = OTHER; note = 2'-O-methyl modified nucleotide
  modified_base 4: mod_base = OTHER; note = 2'-O-methyl modified nucleotide
  modified_base 5: mod_base = OTHER; note = 2'-O-methyl modified nucleotide
  modified_base 6: mod_base = OTHER; note = 2'-O-methyl modified nucleotide
  modified_base 7: mod_base = OTHER; note = 2'-fluoro modified nucleotide
  modified_base 8: mod_base = OTHER; note = 2'-O-methyl modified nucleotide
  modified_base 9: mod_base = OTHER; note = 2'-O-methyl modified nucleotide
  modified_base 10: mod_base = OTHER; note = 2'-O-methyl modified nucleotide
  modified_base 11: mod_base = OTHER; note = 2'-O-methyl modified nucleotide
  modified_base 12: mod_base = OTHER; note = 2'-fluoro modified nucleotide
  modified_base 13: mod_base = OTHER; note = 2'-O-methyl modified nucleotide
  modified_base 14: mod_base = OTHER; note = 2'-fluoro modified nucleotide
  modified_base 15: mod_base = OTHER; note = 2'-O-methyl modified nucleotide
  modified_base 16: mod_base = OTHER; note = 2'-fluoro modified nucleotide
  modified_base 17: mod_base = OTHER; note = 2'-O-methyl modified nucleotide
  modified_base 18: mod_base = OTHER; note = 2'-O-methyl modified nucleotide
  modified_base 19: mod_base = OTHER; note = 2'-O-methyl modified nucleotide
  modified_base 20: mod_base = OTHER; note = 2'-O-methyl modified nucleotide
  modified_base 21: mod_base = OTHER; note = 2'-O-methyl modified nucleotide with thiophosphate linkage
  modified_base 22: mod_base = OTHER; note = 2'-O-methyl modified nucleotide with thiophosphate linkage
  modified_base 23: mod_base = OTHER; note = 2'-O-methyl modified nucleotide
tagatgaccaagcttggcaacga

SEQ ID NO: 851 - RNA, 21 nt, synthetic construct
  source 1..21: mol_type = other RNA
  modified_base 1: mod_base = OTHER; note = 2'-O-methyl modified nucleotide with thiophosphate linkage
  modified_base 2: mod_base = OTHER; note = 2'-fluoro modified nucleotide with thiophosphate linkage
  modified_base 3: mod_base = OTHER; note = 2'-O-methyl modified nucleotide
  modified_base 4: mod_base = OTHER; note = 2'-O-methyl modified nucleotide
  modified_base 5: mod_base = OTHER; note = 2'-O-methyl modified nucleotide
  modified_base 6: mod_base = OTHER; note = Unlocked nucleic acid
  modified_base 7: mod_base = OTHER; note = 2'-fluoro modified nucleotide
  modified_base 8: mod_base = OTHER; note = 2'-O-methyl modified nucleotide
  modified_base 9: mod_base = OTHER; note = 2'-O-methyl modified nucleotide
  modified_base 10: mod_base = OTHER; note = 2'-O-methyl modified nucleotide
  modified_base 11: mod_base = OTHER; note = 2'-O-methyl modified nucleotide
  modified_base 12: mod_base = OTHER; note = 2'-fluoro modified nucleotide
  modified_base 13: mod_base = OTHER; note = 2'-O-methyl modified nucleotide
  modified_base 14: mod_base = OTHER; note = 2'-fluoro modified nucleotide
  modified_base 15: mod_base = OTHER; note = 2'-O-methyl modified nucleotide
  modified_base 16: mod_base = OTHER; note = 2'-fluoro modified nucleotide
  modified_base 17: mod_base = OTHER; note = 2'-O-methyl modified nucleotide
  modified_base 18: mod_base = OTHER; note = 2'-O-methyl modified nucleotide
  modified_base 19: mod_base = OTHER; note = 2'-O-methyl modified nucleotide with thiophosphate linkage
  modified_base 20: mod_base = OTHER; note = 2'-O-methyl modified nucleotide with thiophosphate linkage
  modified_base 21: mod_base = OTHER; note = 2'-O-methyl modified nucleotide
tagatgaccaagcttggcaac

SEQ ID NO: 852 - RNA, 21 nt, synthetic construct
  source 1..21: mol_type = other RNA
  modified_base 1: mod_base = OTHER; note = 2'-O-methyl modified nucleotide with thiophosphate linkage
  modified_base 2: mod_base = OTHER; note = 2'-fluoro modified nucleotide with thiophosphate linkage
  modified_base 3: mod_base = OTHER; note = 2'-O-methyl modified nucleotide
  modified_base 4: mod_base = OTHER; note = 2'-O-methyl modified nucleotide
  modified_base 5: mod_base = OTHER; note = 2'-O-methyl modified nucleotide
  modified_base 6: mod_base = OTHER; note = 2'-O-methyl modified nucleotide
  modified_base 7: mod_base = OTHER; note = Unlocked nucleic acid
  modified_base 8: mod_base = OTHER; note = 2'-O-methyl modified nucleotide
  modified_base 9: mod_base = OTHER; note = 2'-O-methyl modified nucleotide
  modified_base 10: mod_base = OTHER; note = 2'-O-methyl modified nucleotide
  modified_base 11: mod_base = OTHER; note = 2'-O-methyl modified nucleotide
  modified_base 12: mod_base = OTHER; note = 2'-fluoro modified nucleotide
  modified_base 13: mod_base = OTHER; note = 2'-O-methyl modified nucleotide
  modified_base 14: mod_base = OTHER; note = 2'-fluoro modified nucleotide
  modified_base 15: mod_base = OTHER; note = 2'-O-methyl modified nucleotide
  modified_base 16: mod_base = OTHER; note = 2'-fluoro modified nucleotide
  modified_base 17: mod_base = OTHER; note = 2'-O-methyl modified nucleotide
  modified_base 18: mod_base = OTHER; note = 2'-O-methyl modified nucleotide
  modified_base 19: mod_base = OTHER; note = 2'-O-methyl modified nucleotide with thiophosphate linkage
  modified_base 20: mod_base = OTHER; note = 2'-O-methyl modified nucleotide with thiophosphate linkage
  modified_base 21: mod_base = OTHER; note = 2'-O-methyl modified nucleotide
tagatgaccaagcttggcaac

SEQ ID NO: 853 - RNA, 21 nt, synthetic construct
  source 1..21: mol_type = other RNA
  modified_base 1: mod_base = OTHER; note = 2'-O-methyl modified nucleotide with thiophosphate linkage
  modified_base 2: mod_base = OTHER; note = 2'-fluoro modified nucleotide with thiophosphate linkage
  modified_base 3: mod_base = OTHER; note = 2'-O-methyl modified nucleotide
  modified_base 4: mod_base = OTHER; note = 2'-O-methyl modified nucleotide
  modified_base 5: mod_base = OTHER; note = 2'-O-methyl modified nucleotide
  modified_base 6: mod_base = OTHER; note = 2'-fluoro modified nucleotide
  modified_base 7: mod_base = OTHER; note = 2'-O-methyl modified nucleotide
  modified_base 8: mod_base = OTHER; note = 2'-O-methyl modified nucleotide
  modified_base 9: mod_base = OTHER; note = 2'-O-methyl modified nucleotide
  modified_base 10: mod_base = OTHER; note = 2'-O-methyl modified nucleotide
  modified_base 11: mod_base = OTHER; note = 2'-O-methyl modified nucleotide
  modified_base 12: mod_base = OTHER; note = 2'-O-methyl modified nucleotide
  modified_base 13: mod_base = OTHER; note = 2'-O-methyl modified nucleotide
  modified_base 14: mod_base = OTHER; note = 2'-fluoro modified nucleotide
  modified_base 15: mod_base = OTHER; note = 2'-O-methyl modified nucleotide
  modified_base 16: mod_base = OTHER; note = 2'-fluoro modified nucleotide
  modified_base 17: mod_base = OTHER; note = 2'-O-methyl modified nucleotide
  modified_base 18: mod_base = OTHER; note = 2'-O-methyl modified nucleotide
  modified_base 19: mod_base = OTHER; note = 2'-O-methyl modified nucleotide with thiophosphate linkage
  modified_base 20: mod_base = OTHER; note = 2'-O-methyl modified nucleotide with thiophosphate linkage
  modified_base 21: mod_base = OTHER; note = 2'-O-methyl modified nucleotide
tagatgaccaagcttggcaac

SEQ ID NO: 854 - RNA, 21 nt, synthetic construct
  source 1..21: mol_type = other RNA
  modified_base 1: mod_base = OTHER; note = 2'-O-methyl modified nucleotide with thiophosphate linkage
  modified_base 2: mod_base = OTHER; note = 2'-fluoro modified nucleotide with thiophosphate linkage
  modified_base 3: mod_base = OTHER; note = 2'-O-methyl modified nucleotide
  modified_base 4: mod_base = OTHER; note = 2'-O-methyl modified nucleotide
  modified_base 5: mod_base = OTHER; note = 2'-O-methyl modified nucleotide
  modified_base 6: mod_base = OTHER; note = 2'-O-methyl modified nucleotide
  modified_base 7: mod_base = OTHER; note = 2'-fluoro modified nucleotide
  modified_base 8: mod_base = OTHER; note = 2'-O-methyl modified nucleotide
  modified_base 9: mod_base = OTHER; note = 2'-O-methyl modified nucleotide
  modified_base 10: mod_base = OTHER; note = 2'-O-methyl modified nucleotide
  modified_base 11: mod_base = OTHER; note = 2'-O-methyl modified nucleotide
  modified_base 12: mod_base = OTHER; note = 2'-fluoro modified nucleotide
  modified_base 13: mod_base = OTHER; note = 2'-O-methyl modified nucleotide
  modified_base 14: mod_base = OTHER; note = 2'-fluoro modified nucleotide
  modified_base 15: mod_base = OTHER; note = 2'-O-methyl modified nucleotide
  modified_base 16: mod_base = OTHER; note = 2'-fluoro modified nucleotide
  modified_base 17: mod_base = OTHER; note = 2'-O-methyl modified nucleotide
  modified_base 18: mod_base = OTHER; note = 2'-O-methyl modified nucleotide
  modified_base 19: mod_base = OTHER; note = 2'-O-methyl modified nucleotide with thiophosphate linkage
  modified_base 20: mod_base = OTHER; note = 2'-O-methyl modified nucleotide with thiophosphate linkage
  modified_base 21: mod_base = OTHER; note = 2'-O-methyl modified nucleotide
tagatgaccaagcttggcaac

SEQ ID NO: 855 - RNA, 21 nt, synthetic construct
  source 1..21: mol_type = other RNA
  modified_base 1: mod_base = OTHER; note = 2'-O-methyl modified nucleotide with thiophosphate linkage
  modified_base 2: mod_base = OTHER; note = 2'-fluoro modified nucleotide with thiophosphate linkage
  modified_base 3: mod_base = OTHER; note = 2'-O-methyl modified nucleotide
  modified_base 4: mod_base = OTHER; note = 2'-O-methyl modified nucleotide
  modified_base 5: mod_base = OTHER; note = 2'-O-methyl modified nucleotide
  modified_base 6: mod_base = OTHER; note = 2'-O-methyl modified nucleotide
  modified_base 7: mod_base = OTHER; note = 2'-fluoro modified nucleotide
  modified_base 8: mod_base = OTHER; note = 2'-O-methyl modified nucleotide
  modified_base 9: mod_base = OTHER; note = 2'-O-methyl modified nucleotide
  modified_base 10: mod_base = OTHER; note = 2'-O-methyl modified nucleotide
  modified_base 11: mod_base = OTHER; note = 2'-O-methyl modified nucleotide
  modified_base 12: mod_base = OTHER; note = 2'-fluoro modified nucleotide
  modified_base 13: mod_base = OTHER; note = 2'-O-methyl modified nucleotide
  modified_base 14: mod_base = OTHER; note = 2'-fluoro modified nucleotide
  modified_base 15: mod_base = OTHER; note = 2'-O-methyl modified nucleotide
  modified_base 16: mod_base = OTHER; note = 2'-fluoro modified nucleotide
  modified_base 17: mod_base = OTHER; note = 2'-O-methyl modified nucleotide
  modified_base 18: mod_base = OTHER; note = 2'-O-methyl modified nucleotide
  modified_base 19: mod_base = OTHER; note = 2'-O-methyl modified nucleotide with thiophosphate linkage
  modified_base 20: mod_base = OTHER; note = 2'-O-methyl modified nucleotide with thiophosphate linkage
  modified_base 21: mod_base = OTHER; note = 2'-O-methyl modified nucleotide
tggatgaccaagcttggcaac

SEQ ID NO: 856 - RNA, 21 nt, synthetic construct
  source 1..21: mol_type = other RNA
  modified_base 1: mod_base = OTHER; note = 2'-O-methyl modified nucleotide with thiophosphate linkage
  modified_base 2: mod_base = OTHER; note = 2'-fluoro modified nucleotide with thiophosphate linkage
  modified_base 3: mod_base = OTHER; note = 2'-O-methyl modified nucleotide
  modified_base 4: mod_base = OTHER; note = 2'-O-methyl modified nucleotide
  modified_base 5: mod_base = OTHER; note = 2'-O-methyl modified nucleotide
  modified_base 6: mod_base = OTHER; note = 2'-O-methyl modified nucleotide
  modified_base 7: mod_base = OTHER; note = 2'-fluoro modified nucleotide
  modified_base 8: mod_base = OTHER; note = 2'-O-methyl modified nucleotide
  modified_base 9: mod_base = OTHER; note = 2'-O-methyl modified nucleotide
  modified_base 10: mod_base = OTHER; note = 2'-O-methyl modified nucleotide
  modified_base 11: mod_base = OTHER; note = 2'-O-methyl modified nucleotide
  modified_base 12: mod_base = OTHER; note = 2'-fluoro modified nucleotide
  modified_base 13: mod_base = OTHER; note = 2'-O-methyl modified nucleotide
  modified_base 14: mod_base = OTHER; note = 2'-fluoro modified nucleotide
  modified_base 15: mod_base = OTHER; note = 2'-O-methyl modified nucleotide
  modified_base 16: mod_base = OTHER; note = 2'-fluoro modified nucleotide
  modified_base 17: mod_base = OTHER; note = 2'-O-methyl modified nucleotide
  modified_base 18: mod_base = OTHER; note = 2'-O-methyl modified nucleotide
  modified_base 19: mod_base = OTHER; note = 2'-O-methyl modified nucleotide with thiophosphate linkage
  modified_base 20: mod_base = OTHER; note = 2'-O-methyl modified nucleotide with thiophosphate linkage
  modified_base 21: mod_base = OTHER; note = 2'-O-methyl modified nucleotide
tagatgaccaagcttggcaac

SEQ ID NO: 857 - RNA, 21 nt, synthetic construct
  source 1..21: mol_type = other RNA
  modified_base 1: mod_base = OTHER; note = 2'-O-methyl modified nucleotide with thiophosphate linkage
  modified_base 2: mod_base = OTHER; note = 2'-fluoro modified nucleotide with thiophosphate linkage
  modified_base 3: mod_base = OTHER; note = 2'-O-methyl modified nucleotide
  modified_base 4: mod_base = OTHER; note = 2'-O-methyl modified nucleotide
  modified_base 5: mod_base = OTHER; note = 2'-O-methyl modified nucleotide
  modified_base 6: mod_base = OTHER; note = 2'-O-methyl modified nucleotide
  modified_base 7: mod_base = OTHER; note = 2'-fluoro modified nucleotide
  modified_base 8: mod_base = OTHER; note = 2'-O-methyl modified nucleotide
  modified_base 9: mod_base = OTHER; note = 2'-O-methyl modified nucleotide
  modified_base 10: mod_base = OTHER; note = 2'-O-methyl modified nucleotide
  modified_base 11: mod_base = OTHER; note = 2'-O-methyl modified nucleotide
  modified_base 12: mod_base = OTHER; note = 2'-fluoro modified nucleotide
  modified_base 13: mod_base = OTHER; note = 2'-O-methyl modified nucleotide
  modified_base 14: mod_base = OTHER; note = 2'-fluoro modified nucleotide
  modified_base 15: mod_base = OTHER; note = 2'-O-methyl modified nucleotide
  modified_base 16: mod_base = OTHER; note = 2'-fluoro modified nucleotide
  modified_base 17: mod_base = OTHER; note = 2'-O-methyl modified nucleotide
  modified_base 18: mod_base = OTHER; note = 2'-O-methyl modified nucleotide
  modified_base 19: mod_base = OTHER; note = 2'-O-methyl modified nucleotide with thiophosphate linkage
  modified_base 20: mod_base = OTHER; note = 2'-O-methyl modified nucleotide with thiophosphate linkage
  modified_base 21: mod_base = OTHER; note = 2'-O-methyl modified nucleotide
tcctcgataactctgtccatg

SEQ ID NO: 858 - RNA, 21 nt, synthetic construct
  source 1..21: mol_type = other RNA
  modified_base 1: mod_base = OTHER; note = 2'-O-methyl modified nucleotide with thiophosphate linkage
  modified_base 2: mod_base = OTHER; note = 2'-fluoro modified nucleotide with thiophosphate linkage
  modified_base 3: mod_base = OTHER; note = 2'-O-methyl modified nucleotide
  modified_base 4: mod_base = OTHER; note = 2'-O-methyl modified nucleotide
  modified_base 5: mod_base = OTHER; note = 2'-O-methyl modified nucleotide
  modified_base 6: mod_base = OTHER; note = 2'-O-methyl modified nucleotide
  modified_base 7: mod_base = OTHER; note = 2'-fluoro modified nucleotide
  modified_base 8: mod_base = OTHER; note = 2'-O-methyl modified nucleotide
  modified_base 9: mod_base = OTHER; note = 2'-O-methyl modified nucleotide
  modified_base 10: mod_base = OTHER; note = 2'-O-methyl modified nucleotide
  modified_base 11: mod_base = OTHER; note = 2'-O-methyl modified nucleotide
  modified_base 12: mod_base = OTHER; note = 2'-fluoro modified nucleotide
  modified_base 13: mod_base = OTHER; note = 2'-O-methyl modified nucleotide
  modified_base 14: mod_base = OTHER; note = 2'-fluoro modified nucleotide
  modified_base 15: mod_base = OTHER; note = 2'-O-methyl modified nucleotide
  modified_base 16: mod_base = OTHER; note = 2'-fluoro modified nucleotide
  modified_base 17: mod_base = OTHER; note = 2'-O-methyl modified nucleotide
  modified_base 18: mod_base = OTHER; note = 2'-O-methyl modified nucleotide
  modified_base 19: mod_base = OTHER; note = 2'-O-methyl modified nucleotide with thiophosphate linkage
  modified_base 20: mod_base = OTHER; note = 2'-O-methyl modified nucleotide with thiophosphate linkage
  modified_base 21: mod_base = OTHER; note = 2'-O-methyl modified nucleotide
acctcgataactctgtccatg

SEQ ID NO: 859 - RNA, 21 nt, synthetic construct
  source 1..21: mol_type = other RNA
  modified_base 1: mod_base = OTHER; note = 2'-O-methyl modified nucleotide with thiophosphate linkage
  modified_base 2: mod_base = OTHER; note = 2'-fluoro modified nucleotide with thiophosphate linkage
  modified_base 3: mod_base = OTHER; note = 2'-O-methyl modified nucleotide
  modified_base 4: mod_base = OTHER; note = 2'-O-methyl modified nucleotide
  modified_base 5: mod_base = OTHER; note = 2'-O-methyl modified nucleotide
  modified_base 6: mod_base = OTHER; note = 2'-O-methyl modified nucleotide
  modified_base 7: mod_base = OTHER; note = 2'-fluoro modified nucleotide
  modified_base 8: mod_base = OTHER; note = 2'-O-methyl modified nucleotide
  modified_base 9: mod_base = OTHER; note = 2'-O-methyl modified nucleotide
  modified_base 10: mod_base = OTHER; note = 2'-O-methyl modified nucleotide
  modified_base 11: mod_base = OTHER; note = 2'-O-methyl modified nucleotide
  modified_base 12: mod_base = OTHER; note = 2'-fluoro modified nucleotide
  modified_base 13: mod_base = OTHER; note = 2'-O-methyl modified nucleotide
  modified_base 14: mod_base = OTHER; note = 2'-fluoro modified nucleotide
  modified_base 15: mod_base = OTHER; note = 2'-O-methyl modified nucleotide
  modified_base 16: mod_base = OTHER; note = 2'-fluoro modified nucleotide
  modified_base 17: mod_base = OTHER; note = 2'-O-methyl modified nucleotide
  modified_base 18: mod_base = OTHER; note = 2'-O-methyl modified nucleotide
  modified_base 19: mod_base = OTHER; note = 2'-O-methyl modified nucleotide with thiophosphate linkage
  modified_base 20: mod_base = OTHER; note = 2'-O-methyl modified nucleotide with thiophosphate linkage
  modified_base 21: mod_base = OTHER; note = 2'-O-methyl modified nucleotide
gcctcgataactctgtccatg

SEQ ID NO: 860 - RNA, 21 nt, synthetic construct
  source 1..21: mol_type = other RNA
  modified_base 1: mod_base = OTHER; note = 2'-O-methyl modified nucleotide with thiophosphate linkage
  modified_base 2: mod_base = OTHER; note = 2'-fluoro modified nucleotide with thiophosphate linkage
  modified_base 3: mod_base = OTHER; note = 2'-O-methyl modified nucleotide
  modified_base 4: mod_base = OTHER; note = 2'-O-methyl modified nucleotide
  modified_base 5: mod_base = OTHER; note = 2'-O-methyl modified nucleotide
  modified_base 6: mod_base = OTHER; note = 2'-O-methyl modified nucleotide
  modified_base 7: mod_base = OTHER; note = 2'-fluoro modified nucleotide
  modified_base 8: mod_base = OTHER; note = 2'-O-methyl modified nucleotide
  modified_base 9: mod_base = OTHER; note = 2'-O-methyl modified nucleotide
  modified_base 10: mod_base = OTHER; note = 2'-O-methyl modified nucleotide
  modified_base 11: mod_base = OTHER; note = 2'-O-methyl modified nucleotide
  modified_base 12: mod_base = OTHER; note = 2'-fluoro modified nucleotide
  modified_base 13: mod_base = OTHER; note = 2'-O-methyl modified nucleotide
  modified_base 14: mod_base = OTHER; note = 2'-fluoro modified nucleotide
  modified_base 15: mod_base = OTHER; note = 2'-O-methyl modified nucleotide
  modified_base 16: mod_base = OTHER; note = 2'-fluoro modified nucleotide
  modified_base 17: mod_base = OTHER; note = 2'-O-methyl modified nucleotide
  modified_base 18: mod_base = OTHER; note = 2'-O-methyl modified nucleotide
  modified_base 19: mod_base = OTHER; note = 2'-O-methyl modified nucleotide with thiophosphate linkage
  modified_base 20: mod_base = OTHER; note = 2'-O-methyl modified nucleotide with thiophosphate linkage
  modified_base 21: mod_base = OTHER; note = 2'-O-methyl modified nucleotide
ccctcgataactctgtccatg

SEQ ID NO: 861 - RNA, 17 nt, synthetic construct
  source 1..17: mol_type = other RNA
  modified_base 1: mod_base = OTHER; note = 2'-O-methyl modified nucleotide with thiophosphate linkage
  modified_base 2: mod_base = OTHER; note = 2'-fluoro modified nucleotide with thiophosphate linkage
  modified_base 3: mod_base = OTHER; note = 2'-O-methyl modified nucleotide
  modified_base 4: mod_base = OTHER; note = 2'-O-methyl modified nucleotide
  modified_base 5: mod_base = OTHER; note = 2'-O-methyl modified nucleotide
  modified_base 6: mod_base = OTHER; note = 2'-O-methyl modified nucleotide
  modified_base 7: mod_base = OTHER; note = 2'-fluoro modified nucleotide
  modified_base 8: mod_base = OTHER; note = 2'-O-methyl modified nucleotide
  modified_base 9: mod_base = OTHER; note = 2'-O-methyl modified nucleotide
  modified_base 10: mod_base = OTHER; note = 2'-O-methyl modified nucleotide
  modified_base 11: mod_base = OTHER; note = 2'-O-methyl modified nucleotide
  modified_base 12: mod_base = OTHER; note = 2'-fluoro modified nucleotide
  modified_base 13: mod_base = OTHER; note = 2'-O-methyl modified nucleotide
  modified_base 14: mod_base = OTHER; note = 2'-fluoro modified nucleotide
  modified_base 15: mod_base = OTHER; note = 2'-O-methyl modified nucleotide with thiophosphate linkage
  modified_base 16: mod_base = OTHER; note = 2'-fluoro modified nucleotide with thiophosphate linkage
  modified_base 17: mod_base = OTHER; note = 2'-O-methyl modified nucleotide
tcctcgataactctgtc

SEQ ID NO: 862 - RNA, 18 nt, synthetic construct
  source 1..18: mol_type = other RNA
  modified_base 1: mod_base = OTHER; note = 2'-O-methyl modified nucleotide with thiophosphate linkage
  modified_base 2: mod_base = OTHER; note = 2'-fluoro modified nucleotide with thiophosphate linkage
  modified_base 3: mod_base = OTHER; note = 2'-O-methyl modified nucleotide
  modified_base 4: mod_base = OTHER; note = 2'-O-methyl modified nucleotide
  modified_base 5: mod_base = OTHER; note = 2'-O-methyl modified nucleotide
  modified_base 6: mod_base = OTHER; note = 2'-O-methyl modified nucleotide
  modified_base 7: mod_base = OTHER; note = 2'-fluoro modified nucleotide
  modified_base 8: mod_base = OTHER; note = 2'-O-methyl modified nucleotide
  modified_base 9: mod_base = OTHER; note = 2'-O-methyl modified nucleotide
  modified_base 10: mod_base = OTHER; note = 2'-O-methyl modified nucleotide
  modified_base 11: mod_base = OTHER; note = 2'-O-methyl modified nucleotide
  modified_base 12: mod_base = OTHER; note = 2'-fluoro modified nucleotide
  modified_base 13: mod_base = OTHER; note = 2'-O-methyl modified nucleotide
  modified_base 14: mod_base = OTHER; note = 2'-fluoro modified nucleotide
  modified_base 15: mod_base = OTHER; note = 2'-O-methyl modified nucleotide
  modified_base 16: mod_base = OTHER; note = 2'-fluoro modified nucleotide with thiophosphate linkage
  modified_base 17: mod_base = OTHER; note = 2'-O-methyl modified nucleotide with thiophosphate linkage
  modified_base 18: mod_base = OTHER; note = 2'-O-methyl modified nucleotide
tcctcgataactctgtcc

SEQ ID NO: 863 - RNA, 19 nt, synthetic construct
  source 1..19: mol_type = other RNA
  modified_base 1: mod_base = OTHER; note = 2'-O-methyl modified nucleotide with thiophosphate linkage
  modified_base 2: mod_base = OTHER; note = 2'-fluoro modified nucleotide with thiophosphate linkage
  modified_base 3: mod_base = OTHER; note = 2'-O-methyl modified nucleotide
  modified_base 4: mod_base = OTHER; note = 2'-O-methyl modified nucleotide
  modified_base 5: mod_base = OTHER; note = 2'-O-methyl modified nucleotide
  modified_base 6: mod_base = OTHER; note = 2'-O-methyl modified nucleotide
  modified_base 7: mod_base = OTHER; note = 2'-fluoro modified nucleotide
  modified_base 8: mod_base = OTHER; note = 2'-O-methyl modified nucleotide
  modified_base 9: mod_base = OTHER; note = 2'-O-methyl modified nucleotide
  modified_base 10: mod_base = OTHER; note = 2'-O-methyl modified nucleotide
  modified_base 11: mod_base = OTHER; note = 2'-O-methyl modified nucleotide
  modified_base 12: mod_base = OTHER; note = 2'-fluoro modified nucleotide
  modified_base 13: mod_base = OTHER; note = 2'-O-methyl modified nucleotide
  modified_base 14: mod_base = OTHER; note = 2'-fluoro modified nucleotide
  modified_base 15: mod_base = OTHER; note = 2'-O-methyl modified nucleotide
  modified_base 16: mod_base = OTHER; note = 2'-fluoro modified nucleotide
  modified_base 17: mod_base = OTHER; note = 2'-O-methyl modified nucleotide with thiophosphate linkage
  modified_base 18: mod_base = OTHER; note = 2'-O-methyl modified nucleotide with thiophosphate linkage
  modified_base 19: mod_base = OTHER; note = 2'-O-methyl modified nucleotide
tcctcgataactctgtcct

SEQ ID NO: 864 - RNA, 19 nt, synthetic construct
  source 1..19: mol_type = other RNA
  modified_base 1: mod_base = OTHER; note = 2'-O-methyl modified nucleotide with thiophosphate linkage
  modified_base 2: mod_base = OTHER; note = 2'-fluoro modified nucleotide with thiophosphate linkage
  modified_base 3: mod_base = OTHER; note = 2'-O-methyl modified nucleotide
  modified_base 4: mod_base = OTHER; note = 2'-O-methyl modified nucleotide
  modified_base 5: mod_base = OTHER; note = 2'-O-methyl modified nucleotide
  modified_base 6: mod_base = OTHER; note = 2'-O-methyl modified nucleotide
  modified_base 7: mod_base = OTHER; note = 2'-fluoro modified nucleotide
  modified_base 8: mod_base = OTHER; note = 2'-O-methyl modified nucleotide
  modified_base 9: mod_base = OTHER; note = 2'-O-methyl modified nucleotide
  modified_base 10: mod_base = OTHER; note = 2'-O-methyl modified nucleotide
  modified_base 11: mod_base = OTHER; note = 2'-O-methyl modified nucleotide
  modified_base 12: mod_base = OTHER; note = 2'-fluoro modified nucleotide
  modified_base 13: mod_base = OTHER; note = 2'-O-methyl modified nucleotide
  modified_base 14: mod_base = OTHER; note = 2'-fluoro modified nucleotide
  modified_base 15: mod_base = OTHER; note = 2'-O-methyl modified nucleotide
  modified_base 16: mod_base = OTHER; note = 2'-fluoro modified nucleotide
  modified_base 17: mod_base = OTHER; note = 2'-O-methyl modified nucleotide with thiophosphate linkage
  modified_base 18: mod_base = OTHER; note = 2'-O-methyl modified nucleotide with thiophosphate linkage
  modified_base 19: mod_base = OTHER; note = 2'-O-methyl modified nucleotide
tcctcgataactctgtcca

SEQ ID NO: 865 - RNA, 19 nt, synthetic construct
  source 1..19: mol_type = other RNA
  modified_base 1: mod_base = OTHER; note = 2'-O-methyl modified nucleotide with thiophosphate linkage
  modified_base 2: mod_base = OTHER; note = 2'-fluoro modified nucleotide with thiophosphate linkage
  modified_base 3: mod_base = OTHER; note = 2'-O-methyl modified nucleotide
  modified_base 4: mod_base = OTHER; note = 2'-O-methyl modified nucleotide
  modified_base 5: mod_base = OTHER; note = 2'-O-methyl modified nucleotide
  modified_base 6: mod_base = OTHER; note = 2'-O-methyl modified nucleotide
  modified_base 7: mod_base = OTHER; note = 2'-fluoro modified nucleotide
  modified_base 8: mod_base = OTHER; note = 2'-O-methyl modified nucleotide
  modified_base 9: mod_base = OTHER; note = 2'-O-methyl modified nucleotide
  modified_base 10: mod_base = OTHER; note = 2'-O-methyl modified nucleotide
  modified_base 11: mod_base = OTHER; note = 2'-O-methyl modified nucleotide
  modified_base 12: mod_base = OTHER; note = 2'-fluoro modified nucleotide
  modified_base 13: mod_base = OTHER; note = 2'-O-methyl modified nucleotide
  modified_base 14: mod_base = OTHER; note = 2'-fluoro modified nucleotide
  modified_base 15: mod_base = OTHER; note = 2'-O-methyl modified nucleotide
  modified_base 16: mod_base = OTHER; note = 2'-fluoro modified nucleotide
  modified_base 17: mod_base = OTHER; note = 2'-O-methyl modified nucleotide with thiophosphate linkage
  modified_base 18: mod_base = OTHER; note = 2'-O-methyl modified nucleotide with thiophosphate linkage
  modified_base 19: mod_base = OTHER; note = 2'-O-methyl modified nucleotide
tcctcgataactctgtccc

SEQ ID NO: 866 - RNA, 19 nt, synthetic construct
  source 1..19: mol_type = other RNA
  modified_base 1: mod_base = OTHER; note = 2'-O-methyl modified nucleotide with thiophosphate linkage
  modified_base 2: mod_base = OTHER; note = 2'-fluoro modified nucleotide with thiophosphate linkage
  modified_base 3: mod_base = OTHER; note = 2'-O-methyl modified nucleotide
  modified_base 4: mod_base = OTHER; note = 2'-O-methyl modified nucleotide
  modified_base 5: mod_base = OTHER; note = 2'-O-methyl modified nucleotide
  modified_base 6: mod_base = OTHER; note = 2'-O-methyl modified nucleotide
  modified_base 7: mod_base = OTHER; note = 2'-fluoro modified nucleotide
  modified_base 8: mod_base = OTHER; note = 2'-O-methyl modified nucleotide
  modified_base 9: mod_base = OTHER; note = 2'-O-methyl modified nucleotide
  modified_base 10: mod_base = OTHER; note = 2'-O-methyl modified nucleotide
  modified_base 11: mod_base = OTHER; note = 2'-O-methyl modified nucleotide
  modified_base 12: mod_base = OTHER; note = 2'-fluoro modified nucleotide
  modified_base 13: mod_base = OTHER; note = 2'-O-methyl modified nucleotide
  modified_base 14: mod_base = OTHER; note = 2'-fluoro modified nucleotide
  modified_base 15: mod_base = OTHER; note = 2'-O-methyl modified nucleotide
  modified_base 16: mod_base = OTHER; note = 2'-fluoro modified nucleotide
  modified_base 17: mod_base = OTHER; note = 2'-O-methyl modified nucleotide with thiophosphate linkage
  modified_base 18: mod_base = OTHER; note = 2'-O-methyl modified nucleotide with thiophosphate linkage
  modified_base 19: mod_base = OTHER; note = 2'-O-methyl modified nucleotide
tcctcgataactctgtccg

SEQ ID NO: 867 - RNA, 20 nt, synthetic construct
  source 1..20: mol_type = other RNA
  modified_base 1: mod_base = OTHER; note = 2'-O-methyl modified nucleotide with thiophosphate linkage
  modified_base 2: mod_base = OTHER; note = 2'-fluoro modified nucleotide with thiophosphate linkage
  modified_base 3: mod_base = OTHER; note = 2'-O-methyl modified nucleotide
  modified_base 4: mod_base = OTHER; note = 2'-O-methyl modified nucleotide
  modified_base 5: mod_base = OTHER; note = 2'-O-methyl modified nucleotide
  modified_base 6: mod_base = OTHER; note = 2'-O-methyl modified nucleotide
  modified_base 7: mod_base = OTHER; note = 2'-fluoro modified nucleotide
  modified_base 8: mod_base = OTHER; note = 2'-O-methyl modified nucleotide
  modified_base 9: mod_base = OTHER; note = 2'-O-methyl modified nucleotide
  modified_base 10: mod_base = OTHER; note = 2'-O-methyl modified nucleotide
  modified_base 11: mod_base = OTHER; note = 2'-O-methyl modified nucleotide
  modified_base 12: mod_base = OTHER; note = 2'-fluoro modified nucleotide
  modified_base 13: mod_base = OTHER; note = 2'-O-methyl modified nucleotide
  modified_base 14: mod_base = OTHER; note = 2'-fluoro modified nucleotide
  modified_base 15: mod_base = OTHER; note = 2'-O-methyl modified nucleotide
  modified_base 16: mod_base = OTHER; note = 2'-fluoro modified nucleotide
  modified_base 17: mod_base = OTHER; note = 2'-O-methyl modified nucleotide
  modified_base 18: mod_base = OTHER; note = 2'-O-methyl modified nucleotide with thiophosphate linkage
  modified_base 19: mod_base = OTHER; note = 2'-O-methyl modified nucleotide with thiophosphate linkage
  modified_base 20: mod_base = OTHER; note = 2'-O-methyl modified nucleotide
tcctcgataactctgtccat

SEQ ID NO: 868 - RNA, 20 nt, synthetic construct
  source 1..20: mol_type = other RNA
  modified_base 1: mod_base = OTHER; note = 2'-O-methyl modified nucleotide with thiophosphate linkage
  modified_base 2: mod_base = OTHER; note = 2'-fluoro modified nucleotide with thiophosphate linkage
  modified_base 3: mod_base = OTHER; note = 2'-O-methyl modified nucleotide
  modified_base 4: mod_base = OTHER; note = 2'-O-methyl modified nucleotide
  modified_base 5: mod_base = OTHER; note = 2'-O-methyl modified nucleotide
  modified_base 6: mod_base = OTHER; note = 2'-O-methyl modified nucleotide
  modified_base 7: mod_base = OTHER; note = 2'-fluoro modified nucleotide
  modified_base 8: mod_base = OTHER; note = 2'-O-methyl modified nucleotide
  modified_base 9: mod_base = OTHER; note = 2'-O-methyl modified nucleotide
  modified_base 10: mod_base = OTHER; note = 2'-O-methyl modified nucleotide
  modified_base 11: mod_base = OTHER; note = 2'-O-methyl modified nucleotide
  modified_base 12: mod_base = OTHER; note = 2'-fluoro modified nucleotide
  modified_base 13: mod_base = OTHER; note = 2'-O-methyl modified nucleotide
  modified_base 14: mod_base = OTHER; note = 2'-fluoro modified nucleotide
  modified_base 15: mod_base = OTHER; note = 2'-O-methyl modified nucleotide
  modified_base 16: mod_base = OTHER; note = 2'-fluoro modified nucleotide
  modified_base 17: mod_base = OTHER; note = 2'-O-methyl modified nucleotide
  modified_base 18: mod_base = OTHER; note = 2'-O-methyl modified nucleotide with thiophosphate linkage
  modified_base 19: mod_base = OTHER; note = 2'-O-methyl modified nucleotide with thiophosphate linkage
  modified_base 20: mod_base = OTHER; note = 2'-O-methyl modified nucleotide
tcctcgataactctgtccaa

SEQ ID NO: 869 - RNA, 20 nt, synthetic construct
  source 1..20: mol_type = other RNA
  modified_base 1: mod_base = OTHER; note = 2'-O-methyl modified nucleotide with thiophosphate linkage
  modified_base 2: mod_base = OTHER; note = 2'-fluoro modified nucleotide with thiophosphate linkage
  modified_base 3: mod_base = OTHER; note = 2'-O-methyl modified nucleotide
  modified_base 4: mod_base = OTHER; note = 2'-O-methyl modified nucleotide
  modified_base 5: mod_base = OTHER; note = 2'-O-methyl modified nucleotide
  modified_base 6: mod_base = OTHER; note = 2'-O-methyl modified nucleotide
  modified_base 7: mod_base = OTHER; note = 2'-fluoro modified nucleotide
  modified_base 8: mod_base = OTHER; note = 2'-O-methyl modified nucleotide
  modified_base 9: mod_base = OTHER; note = 2'-O-methyl modified nucleotide
  modified_base 10: mod_base = OTHER; note = 2'-O-methyl modified nucleotide
  modified_base 11: mod_base = OTHER; note = 2'-O-methyl modified nucleotide
  modified_base 12: mod_base = OTHER; note = 2'-fluoro modified nucleotide
  modified_base 13: mod_base = OTHER; note = 2'-O-methyl modified nucleotide
  modified_base 14: mod_base = OTHER; note = 2'-fluoro modified nucleotide
  modified_base 15: mod_base = OTHER; note = 2'-O-methyl modified nucleotide
  modified_base 16: mod_base = OTHER; note = 2'-fluoro modified nucleotide
  modified_base 17: mod_base = OTHER; note = 2'-O-methyl modified nucleotide
  modified_base 18: mod_base = OTHER; note = 2'-O-methyl modified nucleotide with thiophosphate linkage
  modified_base 19: mod_base = OTHER; note = 2'-O-methyl modified nucleotide with thiophosphate linkage
  modified_base 20: mod_base = OTHER; note = 2'-O-methyl modified nucleotide
tcctcgataactctgtccac

SEQ ID NO: 870 - RNA, 20 nt, synthetic construct
  source 1..20: mol_type = other RNA
  modified_base 1: mod_base = OTHER; note = 2'-O-methyl modified nucleotide with thiophosphate linkage
  modified_base 2: mod_base = OTHER; note = 2'-fluoro modified nucleotide with thiophosphate linkage
  modified_base 3: mod_base = OTHER; note = 2'-O-methyl modified nucleotide
  modified_base 4: mod_base = OTHER; note = 2'-O-methyl modified nucleotide
  modified_base 5: mod_base = OTHER; note = 2'-O-methyl modified nucleotide
  modified_base 6: mod_base = OTHER; note = 2'-O-methyl modified nucleotide
  modified_base 7: mod_base = OTHER; note = 2'-fluoro modified nucleotide
  modified_base 8: mod_base = OTHER; note = 2'-O-methyl modified nucleotide
  modified_base 9: mod_base = OTHER; note = 2'-O-methyl modified nucleotide
  modified_base 10: mod_base = OTHER; note = 2'-O-methyl modified nucleotide
  modified_base 11: mod_base = OTHER; note = 2'-O-methyl modified nucleotide
  modified_base 12: mod_base = OTHER; note = 2'-fluoro modified nucleotide
  modified_base 13: mod_base = OTHER; note = 2'-O-methyl modified nucleotide
  modified_base 14: mod_base = OTHER; note = 2'-fluoro modified nucleotide
  modified_base 15: mod_base = OTHER; note = 2'-O-methyl modified nucleotide
  modified_base 16: mod_base = OTHER; note = 2'-fluoro modified nucleotide
  modified_base 17: mod_base = OTHER; note = 2'-O-methyl modified nucleotide
  modified_base 18: mod_base = OTHER; note = 2'-O-methyl modified nucleotide with thiophosphate linkage
  modified_base 19: mod_base = OTHER; note = 2'-O-methyl modified nucleotide with thiophosphate linkage
  modified_base 20: mod_base = OTHER; note = 2'-O-methyl modified nucleotide
tcctcgataactctgtccag

SEQ ID NO: 871 - RNA, 21 nt, synthetic construct
  source 1..21: mol_type = other RNA
  modified_base 1: mod_base = OTHER; note = 2'-O-methyl modified nucleotide with thiophosphate linkage
  modified_base 2: mod_base = OTHER; note = 2'-fluoro modified nucleotide with thiophosphate linkage
  modified_base 3: mod_base = OTHER; note = 2'-O-methyl modified nucleotide
  modified_base 4: mod_base = OTHER; note = 2'-O-methyl modified nucleotide
  modified_base 5: mod_base = OTHER; note = 2'-O-methyl modified nucleotide
  modified_base 6: mod_base = OTHER; note = 2'-O-methyl modified nucleotide
  modified_base 7: mod_base = OTHER; note = 2'-fluoro modified nucleotide
  modified_base 8: mod_base = OTHER; note = 2'-O-methyl modified nucleotide
  modified_base 9: mod_base = OTHER; note = 2'-O-methyl modified nucleotide
  modified_base 10: mod_base = OTHER; note = 2'-O-methyl modified nucleotide
  modified_base 11: mod_base = OTHER; note = 2'-O-methyl modified nucleotide
  modified_base 12: mod_base = OTHER; note = 2'-fluoro modified nucleotide
  modified_base 13: mod_base = OTHER; note = 2'-O-methyl modified nucleotide
  modified_base 14: mod_base = OTHER; note = 2'-fluoro modified nucleotide
  modified_base 15: mod_base = OTHER; note = 2'-O-methyl modified nucleotide
  modified_base 16: mod_base = OTHER; note = 2'-fluoro modified nucleotide
  modified_base 17: mod_base = OTHER; note = 2'-O-methyl modified nucleotide
  modified_base 18: mod_base = OTHER; note = 2'-O-methyl modified nucleotide
  modified_base 19: mod_base = OTHER; note = 2'-O-methyl modified nucleotide with thiophosphate linkage
  modified_base 20: mod_base = OTHER; note = 2'-O-methyl modified nucleotide with thiophosphate linkage
  modified_base 21: mod_base = OTHER; note = 2'-O-methyl modified nucleotide
tcctcgataactctgtccata

SEQ ID NO: 872 - RNA, 21 nt, synthetic construct
  source 1..21: mol_type = other RNA
  modified_base 1: mod_base = OTHER; note = 2'-O-methyl modified nucleotide with thiophosphate linkage
  modified_base 2: mod_base = OTHER; note = 2'-fluoro modified nucleotide with thiophosphate linkage
  modified_base 3: mod_base = OTHER; note = 2'-O-methyl modified nucleotide
  modified_base 4: mod_base = OTHER; note = 2'-O-methyl modified nucleotide
  modified_base 5: mod_base = OTHER; note = 2'-O-methyl modified nucleotide
  modified_base 6: mod_base = OTHER; note = 2'-O-methyl modified nucleotide
  modified_base 7: mod_base = OTHER; note = 2'-fluoro modified nucleotide
  modified_base 8: mod_base = OTHER; note = 2'-O-methyl modified nucleotide
  modified_base 9: mod_base = OTHER; note = 2'-O-methyl modified nucleotide
  modified_base 10: mod_base = OTHER; note = 2'-O-methyl modified nucleotide
  modified_base 11: mod_base = OTHER; note = 2'-O-methyl modified nucleotide
  modified_base 12: mod_base = OTHER; note = 2'-fluoro modified nucleotide
  modified_base 13: mod_base = OTHER; note = 2'-O-methyl modified nucleotide
  modified_base 14: mod_base = OTHER; note = 2'-fluoro modified nucleotide
  modified_base 15: mod_base = OTHER; note = 2'-O-methyl modified nucleotide
  modified_base 16: mod_base = OTHER; note = 2'-fluoro modified nucleotide
  modified_base 17: mod_base = OTHER; note = 2'-O-methyl modified nucleotide
  modified_base 18: mod_base = OTHER; note = 2'-O-methyl modified nucleotide
  modified_base 19: mod_base = OTHER; note = 2'-O-methyl modified nucleotide with thiophosphate linkage
  modified_base 20: mod_base = OTHER; note = 2'-O-methyl modified nucleotide with thiophosphate linkage
  modified_base 21: mod_base = OTHER; note = 2'-O-methyl modified nucleotide
tcctcgataactctgtccatc

SEQ ID NO: 873 - RNA, 21 nt, synthetic construct
  source 1..21: mol_type = other RNA
  modified_base 1: mod_base = OTHER; note = 2'-O-methyl modified nucleotide with thiophosphate linkage
  modified_base 2: mod_base = OTHER; note = 2'-fluoro modified nucleotide with thiophosphate linkage
  modified_base 3: mod_base = OTHER; note = 2'-O-methyl modified nucleotide
  modified_base 4: mod_base = OTHER; note = 2'-O-methyl modified nucleotide
  modified_base 5: mod_base = OTHER; note = 2'-O-methyl modified nucleotide
  modified_base 6: mod_base = OTHER; note = 2'-O-methyl modified nucleotide
  modified_base 7: mod_base = OTHER; note = 2'-fluoro modified nucleotide
  modified_base 8: mod_base = OTHER; note = 2'-O-methyl modified nucleotide
  modified_base 9: mod_base = OTHER; note = 2'-O-methyl modified nucleotide
  modified_base 10: mod_base = OTHER; note = 2'-O-methyl modified nucleotide
  modified_base 11: mod_base = OTHER; note = 2'-O-methyl modified nucleotide
  modified_base 12: mod_base = OTHER; note = 2'-fluoro modified nucleotide
  modified_base 13: mod_base = OTHER; note = 2'-O-methyl modified nucleotide
  modified_base 14: mod_base = OTHER; note = 2'-fluoro modified nucleotide
  modified_base 15: mod_base = OTHER; note = 2'-O-methyl modified nucleotide
  modified_base 16: mod_base = OTHER; note = 2'-fluoro modified nucleotide
  modified_base 17: mod_base = OTHER; note = 2'-O-methyl modified nucleotide
  modified_base 18: mod_base = OTHER; note = 2'-O-methyl modified nucleotide
  modified_base 19: mod_base = OTHER; note = 2'-O-methyl modified nucleotide with thiophosphate linkage
  modified_base 20: mod_base = OTHER; note = 2'-O-methyl modified nucleotide with thiophosphate linkage
  modified_base 21: mod_base = OTHER; note = 2'-O-methyl modified nucleotide
tcctcgataactctgtccatt

SEQ ID NO: 874 - RNA, 22 nt, synthetic construct
  source 1..22: mol_type = other RNA
  modified_base 1: mod_base = OTHER; note = 2'-O-methyl modified nucleotide with thiophosphate linkage
  modified_base 2: mod_base = OTHER; note = 2'-fluoro modified nucleotide with thiophosphate linkage
  modified_base 3: mod_base = OTHER; note = 2'-O-methyl modified nucleotide
  modified_base 4: mod_base = OTHER; note = 2'-O-methyl modified nucleotide
  modified_base 5: mod_base = OTHER; note = 2'-O-methyl modified nucleotide
  modified_base 6: mod_base = OTHER; note = 2'-O-methyl modified nucleotide
  modified_base 7: mod_base = OTHER; note = 2'-fluoro modified nucleotide
  modified_base 8: mod_base = OTHER; note = 2'-O-methyl modified nucleotide
  modified_base 9: mod_base = OTHER; note = 2'-O-methyl modified nucleotide
  modified_base 10: mod_base = OTHER; note = 2'-O-methyl modified nucleotide
  modified_base 11: mod_base = OTHER; note = 2'-O-methyl modified nucleotide
  modified_base 12: mod_base = OTHER; note = 2'-fluoro modified nucleotide
  modified_base 13: mod_base = OTHER; note = 2'-O-methyl modified nucleotide
  modified_base 14: mod_base = OTHER; note = 2'-fluoro modified nucleotide
  modified_base 15: mod_base = OTHER; note = 2'-O-methyl modified nucleotide
  modified_base 16: mod_base = OTHER; note = 2'-fluoro modified nucleotide
  modified_base 17: mod_base = OTHER; note = 2'-O-methyl modified nucleotide
  modified_base 18: mod_base = OTHER; note = 2'-O-methyl modified nucleotide
  modified_base 19: mod_base = OTHER; note = 2'-O-methyl modified nucleotide
  modified_base 20: mod_base = OTHER; note = 2'-O-methyl modified nucleotide with thiophosphate linkage
  modified_base 21: mod_base = OTHER; note = 2'-O-methyl modified nucleotide with thiophosphate linkage
  modified_base 22: mod_base = OTHER; note = 2'-O-methyl modified nucleotide
tcctcgataactctgtccatca

SEQ ID NO: 875 - RNA, 23 nt, synthetic construct
  source 1..23: mol_type = other RNA
  modified_base 1: mod_base = OTHER; note = 2'-O-methyl modified nucleotide with thiophosphate linkage
  modified_base 2: mod_base = OTHER; note = 2'-fluoro modified nucleotide with thiophosphate linkage
  modified_base 3: mod_base = OTHER; note = 2'-O-methyl modified nucleotide
  modified_base 4: mod_base = OTHER; note = 2'-O-methyl modified nucleotide
  modified_base 5: mod_base = OTHER; note = 2'-O-methyl modified nucleotide
  modified_base 6: mod_base = OTHER; note = 2'-O-methyl modified nucleotide
  modified_base 7: mod_base = OTHER; note = 2'-fluoro modified nucleotide
  modified_base 8: mod_base = OTHER; note = 2'-O-methyl modified nucleotide
  modified_base 9: mod_base = OTHER; note = 2'-O-methyl modified nucleotide
  modified_base 10: mod_base = OTHER; note = 2'-O-methyl modified nucleotide
  modified_base 11: mod_base = OTHER; note = 2'-O-methyl modified nucleotide
  modified_base 12: mod_base = OTHER; note = 2'-fluoro modified nucleotide
  modified_base 13: mod_base = OTHER; note = 2'-O-methyl modified nucleotide
  modified_base 14: mod_base = OTHER; note = 2'-fluoro modified nucleotide
  modified_base 15: mod_base = OTHER; note = 2'-O-methyl modified nucleotide
  modified_base 16: mod_base = OTHER; note = 2'-fluoro modified nucleotide
  modified_base 17: mod_base = OTHER; note = 2'-O-methyl modified nucleotide
  modified_base 18: mod_base = OTHER; note = 2'-O-methyl modified nucleotide
  modified_base 19: mod_base = OTHER; note = 2'-O-methyl modified nucleotide
  modified_base 20: mod_base = OTHER; note = 2'-O-methyl modified nucleotide
  modified_base 21: mod_base = OTHER; note = 2'-O-methyl modified nucleotide with thiophosphate linkage
  modified_base 22: mod_base = OTHER; note = 2'-O-methyl modified nucleotide with thiophosphate linkage
  modified_base 23: mod_base = OTHER; note = 2'-O-methyl modified nucleotide
tcctcgataactctgtccatcac

SEQ ID NO: 876 - RNA, 24 nt, synthetic construct
  source 1..24: mol_type = other RNA
  modified_base 1: mod_base = OTHER; note = 2'-O-methyl modified nucleotide with thiophosphate linkage
  modified_base 2: mod_base = OTHER; note = 2'-fluoro modified nucleotide with thiophosphate linkage
  modified_base 3: mod_base = OTHER; note = 2'-O-methyl modified nucleotide
  modified_base 4: mod_base = OTHER; note = 2'-O-methyl modified nucleotide
  modified_base 5: mod_base = OTHER; note = 2'-O-methyl modified nucleotide
  modified_base 6: mod_base = OTHER; note = 2'-O-methyl modified nucleotide
  modified_base 7: mod_base = OTHER; note = 2'-fluoro modified nucleotide
  modified_base 8: mod_base = OTHER; note = 2'-O-methyl modified nucleotide
  modified_base 9: mod_base = OTHER; note = 2'-O-methyl modified nucleotide
  modified_base 10: mod_base = OTHER; note = 2'-O-methyl modified nucleotide
  modified_base 11: mod_base = OTHER; note = 2'-O-methyl modified nucleotide
  modified_base 12: mod_base = OTHER; note = 2'-fluoro modified nucleotide
  modified_base 13: mod_base = OTHER; note = 2'-O-methyl modified nucleotide
  modified_base 14: mod_base = OTHER; note = 2'-fluoro modified nucleotide
  modified_base 15: mod_base = OTHER; note = 2'-O-methyl modified nucleotide
  modified_base 16: mod_base = OTHER; note = 2'-fluoro modified nucleotide
  modified_base 17: mod_base = OTHER; note = 2'-O-methyl modified nucleotide
  modified_base 18: mod_base = OTHER; note = 2'-O-methyl modified nucleotide
  modified_base 19: mod_base = OTHER; note = 2'-O-methyl modified nucleotide
  modified_base 20: mod_base = OTHER; note = 2'-O-methyl modified nucleotide
  modified_base 21: mod_base = OTHER; note = 2'-O-methyl modified nucleotide
  modified_base 22: mod_base = OTHER; note = 2'-O-methyl modified nucleotide with thiophosphate linkage
  modified_base 23: mod_base = OTHER; note = 2'-O-methyl modified nucleotide with thiophosphate linkage
  modified_base 24: mod_base = OTHER; note = 2'-O-methyl modified nucleotide
tcctcgataactctgtccatcacc

SEQ ID NO: 877 - RNA, 25 nt, synthetic construct
  source 1..25: mol_type = other RNA
  modified_base 1: mod_base = OTHER; note = 2'-O-methyl modified nucleotide with thiophosphate linkage
  modified_base 2: mod_base = OTHER; note = 2'-fluoro modified nucleotide with thiophosphate linkage
  modified_base 3: mod_base = OTHER; note = 2'-O-methyl modified nucleotide
  modified_base 4: mod_base = OTHER; note = 2'-O-methyl modified nucleotide
  modified_base 5: mod_base = OTHER; note = 2'-O-methyl modified nucleotide
  modified_base 6: mod_base = OTHER; note = 2'-O-methyl modified nucleotide
  modified_base 7: mod_base = OTHER; note = 2'-fluoro modified nucleotide
  modified_base 8: mod_base = OTHER; note = 2'-O-methyl modified nucleotide
  modified_base 9: mod_base = OTHER; note = 2'-O-methyl modified nucleotide
  modified_base 10: mod_base = OTHER; note = 2'-O-methyl modified nucleotide
  modified_base 11: mod_base = OTHER; note = 2'-O-methyl modified nucleotide
  modified_base 12: mod_base = OTHER; note = 2'-fluoro modified nucleotide
  modified_base 13: mod_base = OTHER; note = 2'-O-methyl modified nucleotide
  modified_base 14: mod_base = OTHER; note = 2'-fluoro modified nucleotide
  modified_base 15: mod_base = OTHER; note = 2'-O-methyl modified nucleotide
  modified_base 16: mod_base = OTHER; note = 2'-fluoro modified nucleotide
  modified_base 17: mod_base = OTHER; note = 2'-O-methyl modified nucleotide
  modified_base 18: mod_base = OTHER; note = 2'-O-methyl modified nucleotide
  modified_base 19: mod_base = OTHER; note = 2'-O-methyl modified nucleotide
  modified_base 20: mod_base = OTHER; note = 2'-O-methyl modified nucleotide
  modified_base 21: mod_base = OTHER; note = 2'-O-methyl modified nucleotide
  modified_base 22: mod_base = OTHER; note = 2'-O-methyl modified nucleotide
  modified_base 23: mod_base = OTHER; note = 2'-O-methyl modified nucleotide with thiophosphate linkage
  modified_base 24: mod_base = OTHER; note = 2'-O-methyl modified nucleotide with thiophosphate linkage
  modified_base 25: mod_base = OTHER; note = 2'-O-methyl modified nucleotide
tcctcgataactctgtccatcacca

SEQ ID NO: 878 - RNA, 26 nt, synthetic construct
  source 1..26: mol_type = other RNA
  modified_base 1: mod_base = OTHER; note = 2'-O-methyl modified nucleotide with thiophosphate linkage
  modified_base 2: mod_base = OTHER; note = 2'-fluoro modified nucleotide with thiophosphate linkage
  modified_base 3: mod_base = OTHER; note = 2'-O-methyl modified nucleotide
  modified_base 4: mod_base = OTHER; note = 2'-O-methyl modified nucleotide
  modified_base 5: mod_base = OTHER; note = 2'-O-methyl modified nucleotide
  modified_base 6: mod_base = OTHER; note = 2'-O-methyl modified nucleotide
  modified_base 7: mod_base = OTHER; note = 2'-fluoro modified nucleotide
  modified_base 8: mod_base = OTHER; note = 2'-O-methyl modified nucleotide
  modified_base 9: mod_base = OTHER; note = 2'-O-methyl modified nucleotide
  modified_base 10: mod_base = OTHER; note = 2'-O-methyl modified nucleotide
  modified_base 11: mod_base = OTHER; note = 2'-O-methyl modified nucleotide
  modified_base 12: mod_base = OTHER; note = 2'-fluoro modified nucleotide
  modified_base 13: mod_base = OTHER; note = 2'-O-methyl modified nucleotide
  modified_base 14: mod_base = OTHER; note = 2'-fluoro modified nucleotide
  modified_base 15: mod_base = OTHER; note = 2'-O-methyl modified nucleotide
  modified_base 16: mod_base = OTHER; note = 2'-fluoro modified nucleotide
  modified_base 17: mod_base = OTHER; note = 2'-O-methyl modified nucleotide
  modified_base 18: mod_base = OTHER; note = 2'-O-methyl modified nucleotide
  modified_base 19: mod_base = OTHER; note = 2'-O-methyl modified nucleotide
  modified_base 20: mod_base = OTHER; note = 2'-O-methyl modified nucleotide
  modified_base 21: mod_base = OTHER; note = 2'-O-methyl modified nucleotide
  modified_base 22: mod_base = OTHER; note = 2'-O-methyl modified nucleotide
  modified_base 23: mod_base = OTHER; note = 2'-O-methyl modified nucleotide
  modified_base 24: mod_base = OTHER; note = 2'-O-methyl modified nucleotide with thiophosphate linkage
  modified_base 25: mod_base = OTHER; note = 2'-O-methyl modified nucleotide with thiophosphate linkage
  modified_base 26: mod_base = OTHER; note = 2'-O-methyl modified nucleotide
tcctcgataactctgtccatcaccat

SEQ ID NO: 879 - RNA, 32 nt, synthetic construct; identical to SEQ ID NO: 693
  source 1..32: mol_type = other RNA
  modified_base 1: mod_base = OTHER; note = 2'-O-methyl modified nucleotide with thiophosphate linkage
  modified_base 2: mod_base = OTHER; note = 2'-fluoro modified nucleotide with thiophosphate linkage
  modified_base 3: mod_base = OTHER; note = 2'-O-methyl modified nucleotide
  modified_base 4: mod_base = OTHER; note = 2'-O-methyl modified nucleotide
  modified_base 5: mod_base = OTHER; note = 2'-O-methyl modified nucleotide
  modified_base 6: mod_base = OTHER; note = 2'-O-methyl modified nucleotide
  modified_base 7: mod_base = OTHER; note = 2'-fluoro modified nucleotide
  modified_base 8: mod_base = OTHER; note = 2'-O-methyl modified nucleotide
  modified_base 9: mod_base = OTHER; note = 2'-O-methyl modified nucleotide
  modified_base 10: mod_base = OTHER; note = 2'-O-methyl modified nucleotide
  modified_base 11: mod_base = OTHER; note = 2'-O-methyl modified nucleotide
  modified_base 12: mod_base = OTHER; note = 2'-fluoro modified nucleotide
  modified_base 13: mod_base = OTHER; note = 2'-O-methyl modified nucleotide
  modified_base 14: mod_base = OTHER; note = 2'-fluoro modified nucleotide
  modified_base 15: mod_base = OTHER; note = 2'-O-methyl modified nucleotide
  modified_base 16: mod_base = OTHER; note = 2'-fluoro modified nucleotide
  modified_base 17: mod_base = OTHER; note = 2'-O-methyl modified nucleotide
  modified_base 18: mod_base = OTHER; note = 2'-O-methyl modified nucleotide
  modified_base 19: mod_base = OTHER; note = 2'-O-methyl modified nucleotide
  modified_base 20: mod_base = OTHER; note = 2'-O-methyl modified nucleotide
  modified_base 21: mod_base = OTHER; note = 2'-O-methyl modified nucleotide
  modified_base 22: mod_base = OTHER; note = 2'-O-methyl modified nucleotide
  modified_base 23: mod_base = OTHER; note = 2'-O-methyl modified nucleotide
  modified_base 24: mod_base = OTHER; note = 2'-O-methyl modified nucleotide
  modified_base 25: mod_base = OTHER; note = 2'-O-methyl modified nucleotide
  modified_base 26: mod_base = OTHER; note = 2'-O-methyl modified nucleotide
  modified_base 27: mod_base = OTHER; note = 2'-O-methyl modified nucleotide
  modified_base 28: mod_base = OTHER; note = 2'-O-methyl modified nucleotide
  modified_base 29: mod_base = OTHER; note = 2'-O-methyl modified nucleotide
  modified_base 30: mod_base = OTHER; note = 2'-O-methyl modified nucleotide with thiophosphate linkage
  modified_base 31: mod_base = OTHER; note = 2'-O-methyl modified nucleotide with thiophosphate linkage
  modified_base 32: mod_base = OTHER; note = 2'-O-methyl modified nucleotide

SEQ ID NO: 880 - RNA, 23 nt, synthetic construct
  source 1..23: mol_type = other RNA
  modified_base 1: mod_base = OTHER; note = 2'-O-methyl modified nucleotide with thiophosphate linkage
  modified_base 2: mod_base = OTHER; note = 2'-fluoro modified nucleotide with thiophosphate linkage
  modified_base 3: mod_base = OTHER; note = 2'-O-methyl modified nucleotide
  modified_base 4: mod_base = OTHER; note = 2'-O-methyl modified nucleotide
  modified_base 5: mod_base = OTHER; note = 2'-O-methyl modified nucleotide
  modified_base 6: mod_base = OTHER; note = 2'-O-methyl modified nucleotide
  modified_base 7: mod_base = OTHER; note = 2'-fluoro modified nucleotide
  modified_base 8: mod_base = OTHER; note = 2'-O-methyl modified nucleotide
  modified_base 9: mod_base = OTHER; note = 2'-O-methyl modified nucleotide
  modified_base 10: mod_base = OTHER; note = 2'-O-methyl modified nucleotide
  modified_base 11: mod_base = OTHER; note = 2'-O-methyl modified nucleotide
  modified_base 12: mod_base = OTHER; note = 2'-fluoro modified nucleotide
  modified_base 13: mod_base = OTHER; note = 2'-O-methyl modified nucleotide
  modified_base 14: mod_base = OTHER; note = 2'-fluoro modified nucleotide
  modified_base 15: mod_base = OTHER; note = 2'-O-methyl modified nucleotide
  modified_base 16: mod_base = OTHER; note = 2'-fluoro modified nucleotide
  modified_base 17: mod_base = OTHER; note = 2'-O-methyl modified nucleotide
  modified_base 18: mod_base = OTHER; note = 2'-O-methyl modified nucleotide
  modified_base 19: mod_base = OTHER; note = 2'-O-methyl modified nucleotide
  modified_base 20: mod_base = OTHER; note = 2'-O-methyl modified nucleotide
  modified_base 21: mod_base = OTHER; note = 2'-O-methyl modified nucleotide with thiophosphate linkage
  modified_base 22: mod_base = OTHER; note = 2'-O-methyl modified nucleotide with thiophosphate linkage
  modified_base 23: mod_base = OTHER; note = 2'-O-methyl modified nucleotide
tcctcgataactctgtccatgtt

SEQ ID NO: 881 - RNA, 23 nt, synthetic construct
  source 1..23: mol_type = other RNA
  modified_base 1: mod_base = OTHER; note = 2'-O-methyl modified nucleotide with thiophosphate linkage
  modified_base 2: mod_base = OTHER; note = 2'-fluoro modified nucleotide with thiophosphate linkage
  modified_base 3: mod_base = OTHER; note = 2'-O-methyl modified nucleotide
  modified_base 4: mod_base = OTHER; note = 2'-O-methyl modified nucleotide
  modified_base 5: mod_base = OTHER; note = 2'-O-methyl modified nucleotide
  modified_base 6: mod_base = OTHER; note = 2'-O-methyl modified nucleotide
  modified_base 7: mod_base = OTHER; note = 2'-fluoro modified nucleotide
  modified_base 8: mod_base = OTHER; note = 2'-O-methyl modified nucleotide
  modified_base 9: mod_base = OTHER; note = 2'-O-methyl modified nucleotide
  modified_base 10: mod_base = OTHER; note = 2'-O-methyl modified nucleotide
  modified_base 11: mod_base = OTHER; note = 2'-O-methyl modified nucleotide
  modified_base 12: mod_base = OTHER; note = 2'-fluoro modified nucleotide
  modified_base 13: mod_base = OTHER; note = 2'-O-methyl modified nucleotide
  modified_base 14: mod_base = OTHER; note = 2'-fluoro modified nucleotide
  modified_base 15: mod_base = OTHER; note = 2'-O-methyl modified nucleotide
  modified_base 16: mod_base = OTHER; note = 2'-fluoro modified nucleotide
  modified_base 17: mod_base = OTHER; note = 2'-O-methyl modified nucleotide
  modified_base 18: mod_base = OTHER; note = 2'-O-methyl modified nucleotide
  modified_base 19: mod_base = OTHER; note = 2'-O-methyl modified nucleotide
  modified_base 20: mod_base = OTHER; note = 2'-O-methyl modified nucleotide
  modified_base 21: mod_base = OTHER; note = 2'-O-methyl modified nucleotide with thiophosphate linkage
  modified_base 22: mod_base = OTHER; note = 2'-O-methyl modified nucleotide with thiophosphate linkage
  modified_base 23: mod_base = OTHER; note = 2'-O-methyl modified nucleotide
tcctcgataactctgtccatgga

SEQ ID NO: 882 - RNA, 21 nt, synthetic construct
  source 1..21: mol_type = other RNA
  modified_base 1: mod_base = OTHER; note = 2'-O-methyl modified nucleotide with thiophosphate linkage
  modified_base 2: mod_base = OTHER; note = 2'-fluoro modified nucleotide with thiophosphate linkage
  modified_base 3: mod_base = OTHER; note = 2'-O-methyl modified nucleotide
  modified_base 4: mod_base = OTHER; note = 2'-O-methyl modified nucleotide
  modified_base 5: mod_base = OTHER; note = 2'-O-methyl modified nucleotide
  modified_base 6: mod_base = OTHER; note = Unlocked nucleic acid
  modified_base 7: mod_base = OTHER; note = 2'-fluoro modified nucleotide
  modified_base 8: mod_base = OTHER; note = 2'-O-methyl modified nucleotide
  modified_base 9: mod_base = OTHER; note = 2'-O-methyl modified nucleotide
  modified_base 10: mod_base = OTHER; note = 2'-O-methyl modified nucleotide
  modified_base 11: mod_base = OTHER; note = 2'-O-methyl modified nucleotide
  modified_base 12: mod_base = OTHER; note = 2'-fluoro modified nucleotide
  modified_base 13: mod_base = OTHER; note = 2'-O-methyl modified nucleotide
  modified_base 14: mod_base = OTHER; note = 2'-fluoro modified nucleotide
  modified_base 15: mod_base = OTHER; note = 2'-O-methyl modified nucleotide
  modified_base 16: mod_base = OTHER; note = 2'-fluoro modified nucleotide
  modified_base 17: mod_base = OTHER; note = 2'-O-methyl modified nucleotide
  modified_base 18: mod_base = OTHER; note = 2'-O-methyl modified nucleotide
  modified_base 19: mod_base = OTHER; note = 2'-O-methyl modified nucleotide with thiophosphate linkage
  modified_base 20: mod_base = OTHER; note = 2'-O-methyl modified nucleotide with thiophosphate linkage
  modified_base 21: mod_base = OTHER; note = 2'-O-methyl modified nucleotide
tcctcgataactctgtccatg

SEQ ID NO: 883 - RNA, 21 nt, synthetic construct
  source 1..21: mol_type = other RNA
  modified_base 1: mod_base = OTHER; note = 2'-O-methyl modified nucleotide with thiophosphate linkage
  modified_base 2: mod_base = OTHER; note = 2'-fluoro modified nucleotide with thiophosphate linkage
  modified_base 3: mod_base = OTHER; note = 2'-O-methyl modified nucleotide
  modified_base 4: mod_base = OTHER; note = 2'-O-methyl modified nucleotide
  modified_base 5: mod_base = OTHER; note = 2'-O-methyl modified nucleotide
  modified_base 6: mod_base = OTHER; note = 2'-O-methyl modified nucleotide
  modified_base 7: mod_base = OTHER; note = Unlocked nucleic acid
  modified_base 8: mod_base = OTHER; note = 2'-O-methyl modified nucleotide
  modified_base 9: mod_base = OTHER; note = 2'-O-methyl modified nucleotide
  modified_base 10: mod_base = OTHER; note = 2'-O-methyl modified nucleotide
  modified_base 11: mod_base = OTHER; note = 2'-O-methyl modified nucleotide
  modified_base 12: mod_base = OTHER; note = 2'-fluoro modified nucleotide
  modified_base 13: mod_base = OTHER; note = 2'-O-methyl modified nucleotide
  modified_base 14: mod_base = OTHER; note = 2'-fluoro modified nucleotide
  modified_base 15: mod_base = OTHER; note = 2'-O-methyl modified nucleotide
  modified_base 16: mod_base = OTHER; note = 2'-fluoro modified nucleotide
  modified_base 17: mod_base = OTHER; note = 2'-O-methyl modified nucleotide
  modified_base 18: mod_base = OTHER; note = 2'-O-methyl modified nucleotide
  modified_base 19: mod_base = OTHER; note = 2'-O-methyl modified nucleotide with thiophosphate linkage
  modified_base 20: mod_base = OTHER; note = 2'-O-methyl modified nucleotide with thiophosphate linkage
  modified_base 21: mod_base = OTHER; note = 2'-O-methyl modified nucleotide
tcctcgataactctgtccatg

SEQ ID NO: 884 - RNA, 21 nt, synthetic construct
  source 1..21: mol_type = other RNA
  modified_base 1: mod_base = OTHER; note = 2'-O-methyl modified nucleotide with thiophosphate linkage
  modified_base 2: mod_base = OTHER; note = 2'-fluoro modified nucleotide with thiophosphate linkage
  modified_base 3: mod_base = OTHER; note = 2'-O-methyl modified nucleotide
  modified_base 4: mod_base = OTHER; note = 2'-O-methyl modified nucleotide
  modified_base 5: mod_base = OTHER; note = 2'-O-methyl modified nucleotide
  modified_base 6: mod_base = OTHER; note = 2'-fluoro modified nucleotide
  modified_base 7: mod_base = OTHER; note = 2'-O-methyl modified nucleotide
  modified_base 8: mod_base = OTHER; note = 2'-O-methyl modified nucleotide
  modified_base 9: mod_base = OTHER; note = 2'-O-methyl modified nucleotide
  modified_base 10: mod_base = OTHER; note = 2'-O-methyl modified nucleotide
  modified_base 11: mod_base = OTHER; note = 2'-O-methyl modified nucleotide
  modified_base 12: mod_base = OTHER; note = 2'-O-methyl modified nucleotide
  modified_base 13: mod_base = OTHER; note = 2'-O-methyl modified nucleotide
  modified_base 14: mod_base = OTHER; note = 2'-fluoro modified nucleotide
  modified_base 15: mod_base = OTHER; note = 2'-O-methyl modified nucleotide
  modified_base 16: mod_base = OTHER; note = 2'-fluoro modified nucleotide
  modified_base 17: mod_base = OTHER; note = 2'-O-methyl modified nucleotide
  modified_base 18: mod_base = OTHER; note = 2'-O-methyl modified nucleotide
  modified_base 19: mod_base = OTHER; note = 2'-O-methyl modified nucleotide with thiophosphate linkage
  modified_base 20: mod_base = OTHER; note = 2'-O-methyl modified nucleotide with thiophosphate linkage
  modified_base 21: mod_base = OTHER; note = 2'-O-methyl modified nucleotide
tcctcgataactctgtccatg

SEQ ID NO: 885 - RNA, 21 nt, synthetic construct
  source 1..21: mol_type = other RNA
  modified_base 1: mod_base = OTHER; note = 2'-O-methyl modified nucleotide with thiophosphate linkage
  modified_base 2: mod_base = OTHER; note = 2'-fluoro modified nucleotide with thiophosphate linkage
  modified_base 3: mod_base = OTHER; note = 2'-O-methyl modified nucleotide
  modified_base 4: mod_base = OTHER; note = 2'-O-methyl modified nucleotide
  modified_base 5: mod_base = OTHER; note = 2'-O-methyl modified nucleotide
  modified_base 6: mod_base = OTHER; note = 2'-O-methyl modified nucleotide
  modified_base 7: mod_base = OTHER; note = 2'-fluoro modified nucleotide
  modified_base 8: mod_base = OTHER; note = 2'-O-methyl modified nucleotide
  modified_base 9: mod_base = OTHER; note = 2'-O-methyl modified nucleotide
  modified_base 10: mod_base = OTHER; note = 2'-O-methyl modified nucleotide
  modified_base 11: mod_base = OTHER; note = 2'-O-methyl modified nucleotide
  modified_base 12: mod_base = OTHER; note = 2'-fluoro modified nucleotide
  modified_base 13: mod_base = OTHER; note = 2'-O-methyl modified nucleotide
  modified_base 14: mod_base = OTHER; note = 2'-fluoro modified nucleotide
  modified_base 15: mod_base = OTHER; note = 2'-O-methyl modified nucleotide
  modified_base 16: mod_base = OTHER; note = 2'-fluoro modified nucleotide
  modified_base 17: mod_base = OTHER; note = 2'-O-methyl modified nucleotide
  modified_base 18: mod_base = OTHER; note = 2'-O-methyl modified nucleotide
  modified_base 19: mod_base = OTHER; note = 2'-O-methyl modified nucleotide with thiophosphate linkage
  modified_base 20: mod_base = OTHER; note = 2'-O-methyl modified nucleotide with thiophosphate linkage
  modified_base 21: mod_base = OTHER; note = 2'-O-methyl modified nucleotide
tcctcgataactctgtccatg

SEQ ID NO: 886 - RNA, 21 nt, synthetic construct
  source 1..21: mol_type = other RNA
  modified_base 1: mod_base = OTHER; note = 2'-O-methyl modified nucleotide with thiophosphate linkage
  modified_base 2: mod_base = OTHER; note = 2'-fluoro modified nucleotide with thiophosphate linkage
  modified_base 3: mod_base = OTHER; note = 2'-O-methyl modified nucleotide
  modified_base 4: mod_base = OTHER; note = 2'-O-methyl modified nucleotide
  modified_base 5: mod_base = OTHER; note = 2'-O-methyl modified nucleotide
  modified_base 6: mod_base = OTHER; note = 2'-O-methyl modified nucleotide
  modified_base 7: mod_base = OTHER; note = 2'-fluoro modified nucleotide
  modified_base 8: mod_base = OTHER; note = 2'-O-methyl modified nucleotide
  modified_base 9: mod_base = OTHER; note = 2'-O-methyl modified nucleotide
  modified_base 10: mod_base = OTHER; note = 2'-O-methyl modified nucleotide
  modified_base 11: mod_base = OTHER; note = 2'-O-methyl modified nucleotide
  modified_base 12: mod_base = OTHER; note = 2'-fluoro modified nucleotide
  modified_base 13: mod_base = OTHER; note = 2'-O-methyl modified nucleotide
  modified_base 14: mod_base = OTHER; note = 2'-fluoro modified nucleotide
  modified_base 15: mod_base = OTHER; note = 2'-O-methyl modified nucleotide
  modified_base 16: mod_base = OTHER; note = 2'-fluoro modified nucleotide
  modified_base 17: mod_base = OTHER; note = 2'-O-methyl modified nucleotide
  modified_base 18: mod_base = OTHER; note = 2'-O-methyl modified nucleotide
  modified_base 19: mod_base = OTHER; note = 2'-O-methyl modified nucleotide with thiophosphate linkage
  modified_base 20: mod_base = OTHER; note = 2'-O-methyl modified nucleotide with thiophosphate linkage
  modified_base 21: mod_base = OTHER; note = 2'-O-methyl modified nucleotide
ttctcgataactctgtccatg

SEQ ID NO: 887 - RNA, 21 nt, synthetic construct
  source 1..21: mol_type = other RNA
  modified_base 1: mod_base = OTHER; note = 2'-O-methyl modified nucleotide with thiophosphate linkage
  modified_base 2: mod_base = OTHER; note = 2'-fluoro modified nucleotide with thiophosphate linkage
  modified_base 3: mod_base = OTHER; note = 2'-O-methyl modified nucleotide
  modified_base 4: mod_base = OTHER; note = 2'-O-methyl modified nucleotide
  modified_base 5: mod_base = OTHER; note = 2'-O-methyl modified nucleotide
  modified_base 6: mod_base = OTHER; note = 2'-O-methyl modified nucleotide
  modified_base 7: mod_base = OTHER; note = 2'-fluoro modified nucleotide
  modified_base 8: mod_base = OTHER; note = 2'-O-methyl modified nucleotide
  modified_base 9: mod_base = OTHER; note = 2'-O-methyl modified nucleotide
  modified_base 10: mod_base = OTHER; note = 2'-O-methyl modified nucleotide
  modified_base 11: mod_base = OTHER; note = 2'-O-methyl modified nucleotide
  modified_base 12: mod_base = OTHER; note = 2'-fluoro modified nucleotide
  modified_base 13: mod_base = OTHER; note = 2'-O-methyl modified nucleotide
  modified_base 14: mod_base = OTHER; note = 2'-fluoro modified nucleotide
  modified_base 15: mod_base = OTHER; note = 2'-O-methyl modified nucleotide
  modified_base 16: mod_base = OTHER; note = 2'-fluoro modified nucleotide
  modified_base 17: mod_base = OTHER; note = 2'-O-methyl modified nucleotide
  modified_base 18: mod_base = OTHER; note = 2'-O-methyl modified nucleotide
  modified_base 19: mod_base = OTHER; note = 2'-O-methyl modified nucleotide with thiophosphate linkage
  modified_base 20: mod_base = OTHER; note = 2'-O-methyl modified nucleotide with thiophosphate linkage
  modified_base 21: mod_base = OTHER; note = 2'-O-methyl modified nucleotide
tcctcgataactctgtccatg

SEQ ID NO: 888 - RNA, 21 nt, synthetic construct
  source 1..21: mol_type = other RNA
  modified_base 1: mod_base = OTHER; note = 2'-O-methyl modified nucleotide attached to 5'-5' thiophosphate inverted abasic site which is attached to O-(1-(1-(((2R,3R,4R,5R,6R)-3-acetamido-4,5-dihydroxy-6-(hyd roxymethyl)tetrahydro-2H-pyran-2-yl)oxy)-9,13-bis(2-((2-(2- (((2R,3R,4R,5R,6R)-3-acetamido-4,5-dihydroxy-6-(hydroxymeth yl)tetrahydro-2H-pyran-2-yl)oxy)ethoxy)ethyl)amino)-2-oxoet hyl)-7,14-dioxo-3-oxa-6,9,13-triazaoctadecan-18-oyl)piperid in-4-yl) O-methyl phosphorothioate via a thiophosphate linkage
  modified_base 2: mod_base = OTHER; note = 2'-O-methyl modified nucleotide
  modified_base 3: mod_base = OTHER; note = 2'-O-methyl modified nucleotide
  modified_base 4: mod_base = OTHER; note = 2'-O-methyl modified nucleotide
  modified_base 5: mod_base = OTHER; note = 2'-O-methyl modified nucleotide
  modified_base 6: mod_base = OTHER; note = 2'-O-methyl modified nucleotide
  modified_base 7: mod_base = OTHER; note = 2'-O-methyl modified nucleotide
  modified_base 8: mod_base = OTHER; note = 2'-O-methyl modified nucleotide
  modified_base 9: mod_base = OTHER; note = 2'-fluoro modified nucleotide
  modified_base 10: mod_base = OTHER; note = 2'-O-methyl modified nucleotide
  modified_base 11: mod_base = OTHER; note = 2'-fluoro modified nucleotide
  modified_base 12: mod_base = OTHER; note = 2'-O-methyl modified nucleotide
  modified_base 13: mod_base = OTHER; note = 2'-O-methyl modified nucleotide
  modified_base 14: mod_base = OTHER; note = 2'-fluoro modified nucleotide
  modified_base 15: mod_base = OTHER; note = 2'-O-methyl modified nucleotide
  modified_base 16: mod_base = OTHER; note = 2'-O-methyl modified nucleotide
  modified_base 17: mod_base = OTHER; note = 2'-O-methyl modified nucleotide
  modified_base 18: mod_base = OTHER; note = 2'-O-methyl modified nucleotide
  modified_base 19: mod_base = OTHER; note = 2'-O-methyl modified nucleotide
  modified_base 20: mod_base = OTHER; note = 2'-O-methyl modified nucleotide with thiophosphate linkage
  modified_base 21: mod_base = OTHER; note = 2'-O-methyl modified nucleotide attached to 3'-3' thiophosphate inverted abasic site
gatggacagagttatcgaggt

SEQ ID NO: 889 - RNA, 23 nt, synthetic construct
  source 1..23: mol_type = other RNA
  modified_base 1: mod_base = OTHER; note = Isomannitol thiophosphate attached to O-(1-(1-(((2R,3R,4R,5R,6R)-3-acetamido-4,5-dihydroxy-6-(hyd roxymethyl)tetrahydro-2H-pyran-2-yl)oxy)-9,13-bis(2-((2-(2- (((2R,3R,4R,5R,6R)-3-acetamido-4,5-dihydroxy-6-(hydroxymeth yl)tetrahydro-2H-pyran-2-yl)oxy)ethoxy)ethyl)amino)-2-oxoet hyl)-7,14-dioxo-3-oxa-6,9,13-triazaoctadecan-18-oyl)piperid in-4-yl) O-methyl phosphorothioate via a thiophosphate linkage
  modified_base 2: mod_base = OTHER; note = 2'-O-methyl modified nucleotide
  modified_base 3: mod_base = OTHER; note = 2'-O-methyl modified nucleotide
  modified_base 4: mod_base = OTHER; note = 2'-O-methyl modified nucleotide
  modified_base 5: mod_base = OTHER; note = 2'-O-methyl modified nucleotide
  modified_base 6: mod_base = OTHER; note = 2'-O-methyl modified nucleotide
  modified_base 7: mod_base = OTHER; note = 2'-O-methyl modified nucleotide
  modified_base 8: mod_base = OTHER; note = 2'-O-methyl modified nucleotide
  modified_base 9: mod_base = OTHER; note = 2'-O-methyl modified nucleotide
  modified_base 10: mod_base = OTHER; note = 2'-fluoro modified nucleotide
  modified_base 11: mod_base = OTHER; note = 2'-O-methyl modified nucleotide
  modified_base 12: mod_base = OTHER; note = 2'-fluoro modified nucleotide
  modified_base 13: mod_base = OTHER; note = 2'-O-methyl modified nucleotide
  modified_base 14: mod_base = OTHER; note = 2'-fluoro modified nucleotide
  modified_base 15: mod_base = OTHER; note = 2'-O-methyl modified nucleotide
  modified_base 16: mod_base = OTHER; note = 2'-O-methyl modified nucleotide
  modified_base 17: mod_base = OTHER; note = 2'-O-methyl modified nucleotide
  modified_base 18: mod_base = OTHER; note = 2'-O-methyl modified nucleotide
  modified_base 19: mod_base = OTHER; note = 2'-O-methyl modified nucleotide
  modified_base 20: mod_base = OTHER; note = 2'-O-methyl modified nucleotide
  modified_base 21: mod_base = OTHER; note = 2'-O-methyl modified nucleotide with thiophosphate linkage
  modified_base 22: mod_base = OTHER; note = 2'-O-methyl modified nucleotide with thiophosphate linkage
  modified_base 23: mod_base = OTHER; note = Isomannitol
ngagagttatcgaggcacataan

SEQ ID NO: 890 - RNA, 21 nt, synthetic construct
  source 1..21: mol_type = other RNA
  modified_base 1: mod_base = OTHER; note = 2'-O-methyl modified nucleotide attached to 5'-5' thiophosphate inverted abasic site which is attached to O-(1-(1-(((2R,3R,4R,5R,6R)-3-acetamido-4,5-dihydroxy-6-(hyd roxymethyl)tetrahydro-2H-pyran-2-yl)oxy)-9,13-bis(2-((2-(2- (((2R,3R,4R,5R,6R)-3-acetamido-4,5-dihydroxy-6-(hydroxymeth yl)tetrahydro-2H-pyran-2-yl)oxy)ethoxy)ethyl)amino)-2-oxoet hyl)-7,14-dioxo-3-oxa-6,9,13-triazaoctadecan-18-oyl)piperid in-4-yl) O-methyl phosphorothioate via a thiophosphate linkage
  modified_base 2: mod_base = OTHER; note = 2'-O-methyl modified nucleotide
  modified_base 3: mod_base = OTHER; note = 2'-O-methyl modified nucleotide
  modified_base 4: mod_base = OTHER; note = 2'-O-methyl modified nucleotide
  modified_base 5: mod_base = OTHER; note = 2'-O-methyl modified nucleotide
  modified_base 6: mod_base = OTHER; note = 2'-O-methyl modified nucleotide
  modified_base 7: mod_base = OTHER; note = 2'-O-methyl modified nucleotide
  modified_base 8: mod_base = OTHER; note = 2'-O-methyl modified nucleotide
  modified_base 9: mod_base = OTHER; note = 2'-fluoro modified nucleotide
  modified_base 10: mod_base = OTHER; note = 2'-O-methyl modified nucleotide
  modified_base 11: mod_base = OTHER; note = 2'-fluoro modified nucleotide
  modified_base 12: mod_base = OTHER; note = 2'-O-methyl modified nucleotide
  modified_base 13: mod_base = OTHER; note = 2'-O-methyl modified nucleotide
  modified_base 14: mod_base = OTHER; note = 2'-fluoro modified nucleotide
  modified_base 15: mod_base = OTHER; note = 2'-O-methyl modified nucleotide
  modified_base 16: mod_base = OTHER; note = 2'-O-methyl modified nucleotide
  modified_base 17: mod_base = OTHER; note = 2'-O-methyl modified nucleotide
  modified_base 18: mod_base = OTHER; note = 2'-O-methyl modified nucleotide
  modified_base 19: mod_base = OTHER; note = 2'-O-methyl modified nucleotide
  modified_base 20: mod_base = OTHER; note = 2'-O-methyl modified nucleotide with thiophosphate linkage
  modified_base 21: mod_base = OTHER; note = 2'-O-methyl modified nucleotide attached to 3'-3' thiophosphate inverted abasic site
gagagttatcgaggcacataa

SEQ ID NO: 891 - RNA, 21 nt, synthetic construct
  source 1..21: mol_type = other RNA
  modified_base 1: mod_base = OTHER; note = 2'-O-methyl modified nucleotide attached to 5'-5' thiophosphate inverted abasic site which is attached to O-(1-(1-(((2R,3R,4R,5R,6R)-3-acetamido-4,5-dihydroxy-6-(hyd roxymethyl)tetrahydro-2H-pyran-2-yl)oxy)-9,13-bis(2-((2-(2- (((2R,3R,4R,5R,6R)-3-acetamido-4,5-dihydroxy-6-(hydroxymeth yl)tetrahydro-2H-pyran-2-yl)oxy)ethoxy)ethyl)amino)-2-oxoet hyl)-7,14-dioxo-3-oxa-6,9,13-triazaoctadecan-18-oyl)piperid in-4-yl) O-methyl phosphorothioate via a thiophosphate linkage
  modified_base 2: mod_base = OTHER; note = 2'-O-methyl modified nucleotide
  modified_base 3: mod_base = OTHER; note = 2'-O-methyl modified nucleotide
  modified_base 4: mod_base = OTHER; note = 2'-O-methyl modified nucleotide
  modified_base 5: mod_base = OTHER; note = 2'-O-methyl modified nucleotide
  modified_base 6: mod_base = OTHER; note = 2'-O-methyl modified nucleotide
  modified_base 7: mod_base = OTHER; note = 2'-O-methyl modified nucleotide
  modified_base 8: mod_base = OTHER; note = 2'-O-methyl modified nucleotide
  modified_base 9: mod_base = OTHER; note = 2'-fluoro modified nucleotide with thiophosphate linkage
  modified_base 10: mod_base = OTHER; note = 2'-O-methyl modified nucleotide
  modified_base 11: mod_base = OTHER; note = 2'-fluoro modified nucleotide
  modified_base 12: mod_base = OTHER; note = 2'-O-methyl modified nucleotide
  modified_base 13: mod_base = OTHER; note = 2'-O-methyl modified nucleotide
  modified_base 14: mod_base = OTHER; note = 2'-fluoro modified nucleotide with thiophosphate linkage
  modified_base 15: mod_base = OTHER; note = 2'-O-methyl modified nucleotide
  modified_base 16: mod_base = OTHER; note = 2'-O-methyl modified nucleotide
  modified_base 17: mod_base = OTHER; note = 2'-O-methyl modified nucleotide
  modified_base 18: mod_base = OTHER; note = 2'-O-methyl modified nucleotide
  modified_base 19: mod_base = OTHER; note = 2'-O-methyl modified nucleotide
  modified_base 20: mod_base = OTHER; note = 2'-O-methyl modified nucleotide with thiophosphate linkage
  modified_base 21: mod_base = OTHER; note = 2'-O-methyl modified nucleotide attached to 3'-3' thiophosphate inverted abasic site
gagagttatcgaggcacataa

SEQ ID NO: 892 - RNA, 21 nt, synthetic construct
  source 1..21: mol_type = other RNA
  modified_base 1: mod_base = OTHER; note = 2'-O-methyl modified nucleotide with thiophosphate linkage
  modified_base 2: mod_base = OTHER; note = 2'-fluoro modified nucleotide with thiophosphate linkage
  modified_base 3: mod_base = OTHER; note = 2'-O-methyl modified nucleotide
  modified_base 4: mod_base = OTHER; note = 2'-O-methyl modified nucleotide
  modified_base 5: mod_base = OTHER; note = 2'-fluoro modified nucleotide
  modified_base 6: mod_base = OTHER; note = 2'-O-methyl modified nucleotide
  modified_base 7: mod_base = OTHER; note = Unlocked nucleic acid
  modified_base 8: mod_base = OTHER; note = 2'-O-methyl modified nucleotide
  modified_base 9: mod_base = OTHER; note = 2'-O-methyl modified nucleotide
  modified_base 10: mod_base = OTHER; note = 2'-O-methyl modified nucleotide
  modified_base 11: mod_base = OTHER; note = 2'-O-methyl modified nucleotide
  modified_base 12: mod_base = OTHER; note = 2'-fluoro modified nucleotide
  modified_base 13: mod_base = OTHER; note = 2'-O-methyl modified nucleotide
  modified_base 14: mod_base = OTHER; note = 2'-fluoro modified nucleotide
  modified_base 15: mod_base = OTHER; note = 2'-O-methyl modified nucleotide
  modified_base 16: mod_base = OTHER; note = 2'-O-methyl modified nucleotide
  modified_base 17: mod_base = OTHER; note = 2'-O-methyl modified nucleotide
  modified_base 18: mod_base = OTHER; note = 2'-fluoro modified nucleotide
  modified_base 19: mod_base = OTHER; note = 2'-O-methyl modified nucleotide with thiophosphate linkage
  modified_base 20: mod_base = OTHER; note = 2'-O-methyl modified nucleotide with thiophosphate linkage
  modified_base 21: mod_base = OTHER; note = 2'-O-methyl modified nucleotide
acctcgataactctgtccatc

SEQ ID NO: 893 - RNA, 21 nt, synthetic construct
  source 1..21: mol_type = other RNA
  modified_base 1: mod_base = OTHER; note = 2'-O-methyl modified nucleotide with thiophosphate linkage
  modified_base 2: mod_base = OTHER; note = 2'-fluoro modified nucleotide with thiophosphate linkage
  modified_base 3: mod_base = OTHER; note = 2'-O-methyl modified nucleotide
  modified_base 4: mod_base = OTHER; note = 2'-O-methyl modified nucleotide
  modified_base 5: mod_base = OTHER; note = 2'-O-methyl modified nucleotide
  modified_base 6: mod_base = OTHER; note = 2'-O-methyl modified nucleotide
  modified_base 7: mod_base = OTHER; note = 2'-fluoro modified nucleotide
  modified_base 8: mod_base = OTHER; note = 2'-O-methyl modified nucleotide
  modified_base 9: mod_base = OTHER; note = 2'-O-methyl modified nucleotide
  modified_base 10: mod_base = OTHER; note = 2'-O-methyl modified nucleotide
  modified_base 11: mod_base = OTHER; note = 2'-O-methyl modified nucleotide
  modified_base 12: mod_base = OTHER; note = 2'-fluoro modified nucleotide
  modified_base 13: mod_base = OTHER; note = 2'-O-methyl modified nucleotide
  modified_base 14: mod_base = OTHER; note = 2'-fluoro modified nucleotide
  modified_base 15: mod_base = OTHER; note = 2'-O-methyl modified nucleotide
  modified_base 16: mod_base = OTHER; note = 2'-fluoro modified nucleotide
  modified_base 17: mod_base = OTHER; note = 2'-O-methyl modified nucleotide
  modified_base 18: mod_base = OTHER; note = 2'-O-methyl modified nucleotide
  modified_base 19: mod_base = OTHER; note = 2'-O-methyl modified nucleotide with thiophosphate linkage
  modified_base 20: mod_base = OTHER; note = 2'-O-methyl modified nucleotide with thiophosphate linkage
  modified_base 21: mod_base = OTHER; note = 2'-O-methyl modified nucleotide
ttatgtgcctcgataactctc

SEQ ID NO: 894 - RNA, 21 nt, synthetic construct
  source 1..21: mol_type = other RNA
  modified_base 1: mod_base = OTHER; note = 2'-O-methyl modified nucleotide with thiophosphate linkage
  modified_base 2: mod_base = OTHER; note = 2'-fluoro modified nucleotide with thiophosphate linkage
  modified_base 3: mod_base = OTHER; note = 2'-O-methyl modified nucleotide
  modified_base 4: mod_base = OTHER; note = 2'-O-methyl modified nucleotide
  modified_base 5: mod_base = OTHER; note = 2'-O-methyl modified nucleotide
  modified_base 6: mod_base = OTHER; note = 2'-O-methyl modified nucleotide
  modified_base 7: mod_base = OTHER; note = 2'-O-methyl modified nucleotide
  modified_base 8: mod_base = OTHER; note = 2'-O-methyl modified nucleotide
  modified_base 9: mod_base = OTHER; note = 2'-O-methyl modified nucleotide
  modified_base 10: mod_base = OTHER; note = 2'-O-methyl modified nucleotide
  modified_base 11: mod_base = OTHER; note = 2'-O-methyl modified nucleotide
  modified_base 12: mod_base = OTHER; note = 2'-fluoro modified nucleotide
  modified_base 13: mod_base = OTHER; note = 2'-O-methyl modified nucleotide
  modified_base 14: mod_base = OTHER; note = 2'-fluoro modified nucleotide
  modified_base 15: mod_base = OTHER; note = 2'-O-methyl modified nucleotide
  modified_base 16: mod_base = OTHER; note = 2'-O-methyl modified nucleotide
  modified_base 17: mod_base = OTHER; note = 2'-O-methyl modified nucleotide
  modified_base 18: mod_base = OTHER; note = 2'-O-methyl modified nucleotide
  modified_base 19: mod_base = OTHER; note = 2'-O-methyl modified nucleotide with thiophosphate linkage
  modified_base 20: mod_base = OTHER; note = 2'-O-methyl modified nucleotide with thiophosphate linkage
  modified_base 21: mod_base = OTHER; note = 2'-O-methyl modified nucleotide
ttatgtgcctcgataactctc

SEQ ID NO: 895 - RNA, 21 nt, synthetic construct
  source 1..21: mol_type = other RNA
  modified_base 1: mod_base = OTHER; note = 2'-O-methyl modified nucleotide with thiophosphate linkage
  modified_base 2: mod_base = OTHER; note = 2'-fluoro modified nucleotide with thiophosphate linkage
  modified_base 3: mod_base = OTHER; note = 2'-O-methyl modified nucleotide
  modified_base 4: mod_base = OTHER; note = 2'-O-methyl modified nucleotide
  modified_base 5: mod_base = OTHER; note = 2'-O-methyl modified nucleotide
  modified_base 6: mod_base = OTHER; note = 2'-O-methyl modified nucleotide
  modified_base 7: mod_base = OTHER; note = 2'-O-methyl modified nucleotide
  modified_base 8: mod_base = OTHER; note = 2'-O-methyl modified nucleotide
  modified_base 9: mod_base = OTHER; note = 2'-O-methyl modified nucleotide
  modified_base 10: mod_base = OTHER; note = 2'-O-methyl modified nucleotide
  modified_base 11: mod_base = OTHER; note = 2'-O-methyl modified nucleotide
  modified_base 12: mod_base = OTHER; note = 2'-fluoro modified nucleotide with thiophosphate linkage
  modified_base 13: mod_base = OTHER; note = 2'-O-methyl modified nucleotide
  modified_base 14: mod_base = OTHER; note = 2'-fluoro modified nucleotide with thiophosphate linkage
  modified_base 15: mod_base = OTHER; note = 2'-O-methyl modified nucleotide
  modified_base 16: mod_base = OTHER; note = 2'-O-methyl modified nucleotide
  modified_base 17: mod_base = OTHER; note = 2'-O-methyl modified nucleotide
  modified_base 18: mod_base = OTHER; note = 2'-O-methyl modified nucleotide
  modified_base 19: mod_base = OTHER; note = 2'-O-methyl modified nucleotide with thiophosphate linkage
  modified_base 20: mod_base = OTHER; note = 2'-O-methyl modified nucleotide with thiophosphate linkage
  modified_base 21: mod_base = OTHER; note = 2'-O-methyl modified nucleotide
ttatgtgcctcgataactctc

SEQ ID NO: 896 - RNA, 32 nt, synthetic construct
  source 1..32: mol_type = other RNA
  misc_difference 1: note = a, c, u, g, unknown or other
  misc_difference 2: note = a, c, u, g, unknown or other
  misc_difference 3: note = a, c, u, g, unknown or other
  misc_difference 4: note = a, c, u, g, unknown or other
  misc_difference 5: note = a, c, u, g, unknown or other
  misc_difference 6: note = a, c, u, g, unknown or other
  misc_difference 7: note = a, c, u, g, unknown or other
  misc_difference 8: note = a, c, u, g, unknown or other
  misc_difference 9: note = a, c, u, g, unknown or other
  misc_difference 10: note = a, c, u, g, unknown or other
  misc_difference 11: note = a, c, u, g, unknown or other
  misc_difference 12: note = a, c, u, g, unknown or other
  misc_difference 13: note = a, c, u, g, unknown or other
  misc_difference 14: note = a, c, u, g, unknown or other
  misc_difference 15: note = a, c, u, g, unknown or other
  misc_difference 32: note = a, c, u, g, or absent
  misc_difference 1..15: note = This region may encompass 0-15 nucleotides
nnnnnnnnnnnnnnngttatcgaggcacatan

SEQ ID NO: 897 - RNA, 10 nt, synthetic construct
  source 1..10: mol_type = other RNA
aatggacaga

SEQ ID NO: 898 - RNA, 11 nt, synthetic construct
  source 1..11: mol_type = other RNA
taatggacaga

SEQ ID NO: 899 - RNA, 12 nt, synthetic construct
  source 1..12: mol_type = other RNA
gtaatggacaga

SEQ ID NO: 900 - RNA, 13 nt, synthetic construct
  source 1..13: mol_type = other RNA
ggtaatggacaga

SEQ ID NO: 901 - RNA, 14 nt, synthetic construct
  source 1..14: mol_type = other RNA
tggtaatggacaga

SEQ ID NO: 902 - RNA, 15 nt, synthetic construct
  source 1..15: mol_type = other RNA
atggtaatggacaga

SEQ ID NO: 903 - RNA, 32 nt, synthetic construct
  source 1..32: mol_type = other RNA
  misc_difference 1: note = a, c, u, g, or absent
  misc_difference 18: note = a, c, u, g, unknown or other
  misc_difference 19: note = a, c, u, g, unknown or other
  misc_difference 20: note = a, c, u, g, unknown or other
  misc_difference 21: note = a, c, u, g, unknown or other
  misc_difference 22: note = a, c, u, g, unknown or other
  misc_difference 23: note = a, c, u, g, unknown or other
  misc_difference 24: note = a, c, u, g, unknown or other
  misc_difference 25: note = a, c, u, g, unknown or other
  misc_difference 26: note = a, c, u, g, unknown or other
  misc_difference 27: note = a, c, u, g, unknown or other
  misc_difference 28: note = a, c, u, g, unknown or other
  misc_difference 29: note = a, c, u, g, unknown or other
  misc_difference 30: note = a, c, u, g, unknown or other
  misc_difference 31: note = a, c, u, g, unknown or other
  misc_difference 32: note = a, c, u, g, unknown or other
  misc_difference 18..32: note = This region may encompass 0-15 nucleotides
ntatgtgcctcgataacnnnnnnnnnnnnnnn

SEQ ID NO: 904 - RNA, 10 nt, synthetic construct
  source 1..10: mol_type = other RNA
tctgtccatt

SEQ ID NO: 905 - RNA, 11 nt, synthetic construct
  source 1..11: mol_type = other RNA
tctgtccatta

SEQ ID NO: 906 - RNA, 12 nt, synthetic construct
  source 1..12: mol_type = other RNA
tctgtccattac

SEQ ID NO: 907 - RNA, 13 nt, synthetic construct
  source 1..13: mol_type = other RNA
tctgtccattacc

SEQ ID NO: 908 - RNA, 14 nt, synthetic construct
  source 1..14: mol_type = other RNA
tctgtccattacca

SEQ ID NO: 909 - RNA, 15 nt, synthetic construct
  source 1..15: mol_type = other RNA
tctgtccattaccat

SEQ ID NO: 910 - RNA, 32 nt, synthetic construct
  source 1..32: mol_type = other RNA
  misc_difference 1: note = a, c, u, g, unknown or other
  misc_difference 2: note = a, c, u, g, unknown or other
  misc_difference 3: note = a, c, u, g, unknown or other
  misc_difference 4: note = a, c, u, g, unknown or other
  misc_difference 5: note = a, c, u, g, unknown or other
  misc_difference 6: note = a, c, u, g, unknown or other
  misc_difference 7: note = a, c, u, g, unknown or other
  misc_difference 8: note = a, c, u, g, unknown or other
  misc_difference 9: note = a, c, u, g, unknown or other
  misc_difference 10: note = a, c, u, g, unknown or other
  misc_difference 11: note = a, c, u, g, unknown or other
  misc_difference 12: note = a, c, u, g, unknown or other
  misc_difference 13: note = a, c, u, g, unknown or other
  misc_difference 14: note = a, c, u, g, unknown or other
  misc_difference 15: note = a, c, u, g, unknown or other
  misc_difference 32: note = a, c, u, g, or absent
  misc_difference 1..15: note = This region may encompass 0-15 nucleotides
nnnnnnnnnnnnnnnccaagcttggtcatctn

SEQ ID NO: 911 - RNA, 10 nt, synthetic construct
  source 1..10: mol_type = other RNA
gaagaacttg

SEQ ID NO: 912 - RNA, 11 nt, synthetic construct
  source 1..11: mol_type = other RNA
ggaagaacttg

SEQ ID NO: 913 - RNA, 12 nt, synthetic construct
  source 1..12: mol_type = other RNA
aggaagaacttg

SEQ ID NO: 914 - RNA, 13 nt, synthetic construct
  source 1..13: mol_type = other RNA
caggaagaacttg

SEQ ID NO: 915 - RNA, 14 nt, synthetic construct
  source 1..14: mol_type = other RNA
acaggaagaacttg

SEQ ID NO: 916 - RNA, 15 nt, synthetic construct
  source 1..15: mol_type = other RNA
cacaggaagaacttg

SEQ ID NO: 917 - RNA, 32 nt, synthetic construct
  source 1..32: mol_type = other RNA
  misc_difference 1: note = a, c, u, g, or absent
  misc_difference 18: note = a, c, u, g, unknown or other
  misc_difference 19: note = a, c, u, g, unknown or other
  misc_difference 20: note = a, c, u, g, unknown or other
  misc_difference 21: note = a, c, u, g, unknown or other
  misc_difference 22: note = a, c, u, g, unknown or other
  misc_difference 23: note = a, c, u, g, unknown or other
  misc_difference 24: note = a, c, u, g, unknown or other
  misc_difference 25: note = a, c, u, g, unknown or other
  misc_difference 26: note = a, c, u, g, unknown or other
  misc_difference 27: note = a, c, u, g, unknown or other
  misc_difference 28: note = a, c, u, g, unknown or other
  misc_difference 29: note = a, c, u, g, unknown or other
  misc_difference 30: note = a, c, u, g, unknown or other
  misc_difference 31: note = a, c, u, g, unknown or other
  misc_difference 32: note = a, c, u, g, unknown or other
  misc_difference 18..32: note = This region may encompass 0-15 nucleotides
nagatgaccaagcttggnnnnnnnnnnnnnnn

SEQ ID NO: 918 - RNA, 10 nt, synthetic construct
  source 1..10: mol_type = other RNA
caagttcttc

SEQ ID NO: 919 - RNA, 11 nt, synthetic construct
  source 1..11: mol_type = other RNA
caagttcttcc

SEQ ID NO: 920 - RNA, 12 nt, synthetic construct
  source 1..12: mol_type = other RNA
caagttcttcct

SEQ ID NO: 921 - RNA, 13 nt, synthetic construct
  source 1..13: mol_type = other RNA
caagttcttcctg

SEQ ID NO: 922 - RNA, 14 nt, synthetic construct
  source 1..14: mol_type = other RNA
caagttcttcctgt

SEQ ID NO: 923 - RNA, 15 nt, synthetic construct
  source 1..15: mol_type = other RNA
caagttcttcctgtg

SEQ ID NO: 924 - RNA, 32 nt, synthetic construct
  source 1..32: mol_type = other RNA
  misc_difference 1: note = a, c, u, g, unknown or other
  misc_difference 2: note = a, c, u, g, unknown or other
  misc_difference 3: note = a, c, u, g, unknown or other
  misc_difference 4: note = a, c, u, g, unknown or other
  misc_difference 5: note = a, c, u, g, unknown or other
  misc_difference 6: note = a, c, u, g, unknown or other
  misc_difference 7: note = a, c, u, g, unknown or other
  misc_difference 8: note = a, c, u, g, unknown or other
  misc_difference 9: note = a, c, u, g, unknown or other
  misc_difference 10: note = a, c, u, g, unknown or other
  misc_difference 11: note = a, c, u, g, unknown or other
  misc_difference 12: note = a, c, u, g, unknown or other
  misc_difference 13: note = a, c, u, g, unknown or other
  misc_difference 14: note = a, c, u, g, unknown or other
  misc_difference 15: note = a, c, u, g, unknown or other
  misc_difference 32: note = a, c, u, g, or absent
  misc_difference 1..15: note = This region may encompass 0-15 nucleotides
nnnnnnnnnnnnnnngacagagttatcgaggn

SEQ ID NO: 925 - RNA, 10 nt, synthetic construct
  source 1..10: mol_type = other RNA
catggtgatg

SEQ ID NO: 926 - RNA, 11 nt, synthetic construct
  source 1..11: mol_type = other RNA
ccatggtgatg

SEQ ID NO: 927 - RNA, 12 nt, synthetic construct
  source 1..12: mol_type = other RNA
accatggtgatg

SEQ ID NO: 928 - RNA, 13 nt, synthetic construct
  source 1..13: mol_type = other RNA
taccatggtgatg

SEQ ID NO: 929 - RNA, 14 nt, synthetic construct
  source 1..14: mol_type = other RNA
ctaccatggtgatg

SEQ ID NO: 930 - RNA, 15 nt, synthetic construct
  source 1..15: mol_type = other RNA
gctaccatggtgatg

SEQ ID NO: 931 - RNA, 32 nt, synthetic construct
  source 1..32: mol_type = other RNA
  misc_difference 1: note = a, c, u, g, or absent
  misc_difference 18: note = a, c, u, g, unknown or other
  misc_difference 19: note = a, c, u, g, unknown or other
  misc_difference 20: note = a, c, u, g, unknown or other
  misc_difference 21: note = a, c, u, g, unknown or other
  misc_difference 22: note = a, c, u, g, unknown or other
  misc_difference 23: note = a, c, u, g, unknown or other
  misc_difference 24: note = a, c, u, g, unknown or other
  misc_difference 25: note = a, c, u, g, unknown or other
  misc_difference 26: note = a, c, u, g, unknown or other
  misc_difference 27: note = a, c, u, g, unknown or other
  misc_difference 28: note = a, c, u, g, unknown or other
  misc_difference 29: note = a, c, u, g, unknown or other
  misc_difference 30: note = a, c, u, g, unknown or other
  misc_difference 31: note = a, c, u, g, unknown or other
  misc_difference 32: note = a, c, u, g, unknown or other
  misc_difference 18..32: note = This region may encompass 0-15 nucleotides
ncctcgataactctgtcnnnnnnnnnnnnnnn

SEQ ID NO: 932 - RNA, 10 nt, synthetic construct
  source 1..10: mol_type = other RNA
catcaccatg

SEQ ID NO: 933 - RNA, 11 nt, synthetic construct
  source 1..11: mol_type = other RNA
catcaccatgg

SEQ ID NO: 934 - RNA, 12 nt, synthetic construct
  source 1..12: mol_type = other RNA
catcaccatggt

SEQ ID NO: 935 - RNA, 13 nt, synthetic construct
  source 1..13: mol_type = other RNA
catcaccatggta

SEQ ID NO: 936 - RNA, 14 nt, synthetic construct
  source 1..14: mol_type = other RNA
catcaccatggtag

SEQ ID NO: 937 - RNA, 15 nt, synthetic construct
  source 1..15: mol_type = other RNA
catcaccatggtagc

1-72. (canceled)

73. A double-stranded ribonucleic acid (dsRNA) agent for inhibiting Apolipoprotein (a) (LPA) gene expression, wherein the dsRNA agent comprises a sense strand of no more than 23 nucleotides in length and an antisense strand of no more than 23 nucleotides in length, wherein the sense strand comprises the nucleotide sequence of SEQ ID NO: 117 (5′-GAGAGUUAUCGAGGCACAUAA-3′), and wherein the antisense strand comprises the nucleotide sequence of SEQ ID NO: 244 (5′-UUAUGUGCCUCGAUAACUCUC-3′).

74. The dsRNA agent of claim 73, wherein the sense strand and/or the antisense strand comprise at least one modified nucleotide.

75. The dsRNA agent of claim 74, wherein the at least one modified nucleotide comprises a 2′-fluoronucleotide, a 2′-O-methyl (2′-OMe) nucleotide, or a combination thereof.

76. The dsRNA agent of claim 74, wherein all nucleotides in the sense strand and/or the antisense strand are modified nucleotides.

77. The dsRNA agent of claim 73, wherein the sense strand comprises 1, 2, 3, or 4 phosphorothioate linkages and/or the antisense strand comprises 1, 2, 3, or 4 phosphorothioate linkages.

78. The dsRNA agent of claim 73, wherein the sense strand further comprises an isomannitol residue on the 5′ end and an isomannitol residue on the 3′ end of the sense strand, and wherein each isomannitol residue is connected to the sense strand by a phosphorothioate linkage.

79. The dsRNA agent of claim 78, wherein the isomannitol residue is

[chemical structure]

80. The dsRNA agent of claim 73, wherein the sense strand further comprises a targeting group, wherein the targeting group is connected to the 5′ end of the sense strand by a phosphorothioate linkage, and wherein the targeting group comprises GLS-15:

[chemical structure]

81. The dsRNA agent of claim 73, wherein
a. the sense strand comprises the nucleotide sequence 5′-gagaguuaUcGaGgcacaua*a-3′, and
b. the antisense strand comprises the nucleotide sequence 5′-u*U*auguGccucGaUaAcuc*u*c-3′,
wherein each nucleotide in lower case comprises a 2′-OMe modification, each nucleotide in upper case comprises a 2′-fluoro modification, and each star (*) indicates a phosphorothioate linkage.

82. A dsRNA agent for inhibiting LPA gene expression, wherein the dsRNA agent comprises a sense strand and an antisense strand, wherein the sense strand comprises the nucleotide sequence and modifications of SEQ ID NO: 889 ((GLS-15)*(Imann)*gagaguuaUcGaGgcacaua*a*(Imann)), wherein the antisense strand comprises the nucleotide sequence and modifications of SEQ ID NO: 893 (u*U*auguGccucGaUaAcuc*u*c), and wherein each nucleotide in lower case comprises a 2′-OMe modification, each nucleotide in upper case comprises a 2′-fluoro modification, and each star (*) indicates a phosphorothioate linkage.

83. A composition comprising the dsRNA agent of claim 73 and a pharmaceutically acceptable carrier.

84. The composition of claim 83, wherein the composition is formulated for subcutaneous administration.

85. The composition of claim 83, further comprising one or more additional therapeutic agents.

86. The composition of claim 85, wherein the one or more additional therapeutic agents comprise a HMg Co-A reductase inhibitor, ezetimibe, a PCSK-9 inhibitor, a CTEP inhibitor, an ANGPTL3-targeting therapy, an AGT-targeting therapy, an APOC3-targeting therapy, niacin, or any combination thereof.

87. A composition comprising the dsRNA agent of claim 82 and a pharmaceutically acceptable carrier.

88. The composition of claim 87, wherein the composition is packaged in a kit, a container, a pack, a dispenser, a prefilled syringe, or a vial.

89. The composition of claim 87, wherein the composition is formulated for subcutaneous administration.

90. The composition of claim 87, further comprising one or more additional therapeutic agents.

91. The composition of claim 90, wherein the one or more additional therapeutic agents comprise a HMg Co-A reductase inhibitor, ezetimibe, a PCSK-9 inhibitor, a CTEP inhibitor, an ANGPTL3-targeting therapy, an AGT-targeting therapy, an APOC3-targeting therapy, niacin, or any combination thereof.

92. A method of treating an LPA-related disease or condition in a subject, comprising administering the dsRNA agent of claim 73 at an effective dose to reduce serum Lp(a) levels, thereby treating the subject's LPA-related disease or condition.

93. The method of claim 92, wherein the LPA-related disease or condition is a cardiovascular disease, wherein the cardiovascular disease is selected from the group consisting of: Berger's disease, peripheral arterial disease, coronary artery disease, metabolic syndrome, acute coronary syndrome, aortic stenosis, aortic regurgitation, aortic dissection, retinal artery occlusion, a cerebrovascular disease, mesenteric ischemia, superior mesenteric artery occlusion, renal artery stenosis, stable angina, unstable angina, acute coronary syndrome, heterozygous familial hypercholesterolemia, homozygous familial hypercholesterolemia, hyperapolipoprotein beta lipoproteinemia, cerebrovascular atherosclerosis, venous thrombosis, stroke, atherosclerosis, thrombosis, a coronary heart disease, and a disease or pathology related to elevated levels of Lp(a)-containing particles.

94. A method of treating an LPA-related disease or condition in a subject comprising administering the dsRNA agent of claim 82 at an effective dose to reduce serum Lp(a) levels, thereby treating the subject's LPA-related disease or condition.

95. The method of claim 94, wherein the LPA-related disease or condition is a cardiovascular disease, wherein the cardiovascular disease is selected from the group consisting of: Berger's disease, peripheral arterial disease, coronary artery disease, metabolic syndrome, acute coronary syndrome, aortic stenosis, aortic regurgitation, aortic dissection, retinal artery occlusion, a cerebrovascular disease, mesenteric ischemia, superior mesenteric artery occlusion, renal artery stenosis, stable angina, unstable angina, acute coronary syndrome, heterozygous familial hypercholesterolemia, homozygous familial hypercholesterolemia, hyperapolipoprotein beta lipoproteinemia, cerebrovascular atherosclerosis, venous thrombosis, stroke, atherosclerosis, thrombosis, a coronary heart disease, and a disease or pathology related to elevated levels of Lp(a)-containing particles.

96. A method of inhibiting LPA gene expression in a subject, comprising administering to the subject an effective amount of the dsRNA agent of claim 73.

97. A method of inhibiting LPA gene expression in a subject, comprising administering to the subject an effective amount of the dsRNA agent of claim 82.

98. A double-stranded ribonucleic acid (dsRNA) agent, wherein the dsRNA agent comprises a sense strand of no more than 23 nucleotides in length, wherein the sense strand comprises the nucleotide sequence of SEQ ID NO: 117 (5′-GAGAGUUAUCGAGGCACAUAA-3′).

99. The dsRNA agent of claim 98, wherein the sense strand comprises the nucleotide sequence 5′-gagaguuaUcGaGgcacauaa-3′, wherein each nucleotide in lower case comprises a 2′-OMe modification and each nucleotide in upper case comprises a 2′-fluoro modification.

100. The dsRNA agent of claim 98, wherein the sense strand comprises the nucleotide sequence and modifications of SEQ ID NO: 889 ((GLS-15)*(Imann)*gagaguuaUcGaGgcacaua*a*(Imann)), wherein each nucleotide in lower case comprises a 2′-OMe modification, each nucleotide in upper case comprises a 2′-fluoro modification, and each star (*) indicates a phosphorothioate linkage.

101. A double-stranded ribonucleic acid (dsRNA) agent, wherein the dsRNA agent comprises an antisense strand of no more than 23 nucleotides in length, wherein the antisense strand comprises the nucleotide sequence of SEQ ID NO: 244 (5′-UUAUGUGCCUCGAUAACUCUC-3′).

102. The dsRNA agent of claim 101, wherein the antisense strand comprises the nucleotide sequence and modifications of SEQ ID NO: 893 (u*U*auguGccucGaUaAcuc*u*c), and wherein each nucleotide in lower case comprises a 2′-OMe modification, each nucleotide in upper case comprises a 2′-fluoro modification, and each star (*) indicates a phosphorothioate linkage.
